United States Patent Application Publication US 2026/0258423 A1 - sequence listing, part 57

SEQ ID NO: 301568 - DNA, 83257441 bp, Homo sapiens (residues 38,426,527-40,561,333 of 83,257,441)
  source 1..83257441: mol_type = genomic DNA
gcaaaaagagtgaaactccatctcaaaaaaaaaaaaaaaaaaaaaatccaggcagtatgacagattacagttagacagcaggaaggactttccagaagtggaggctaattctggctgcacatgaccttgataaaaagggatgaggaagggagaggagtcatttaactgcccctccattattatgaaacagaatccctttctcttgactgccaggggatttaaaatacattaaataaagcatatgagctaaaccccagtcagtatctcattcctcaggttcacaggagtagggatggcctaattgttgtctggggcaccccaacccctctaagacctgagttcccaaccctgatcaaggttaaaggggtggaggtcttggggctgctcggctctcaggggtctccttgcccaaggaaggtggtgactccagcaggcagagctggccttcccgctttcactgcctcctctctccaagtcctattttatcctccgccttcttttctacataatctgggaaaaggaatatggaagccccttaaactgaaaaagtcatgggaaagaggtaagcataagctggaggaagtaagaagcaggaagaatgggagttagatagtagaaagaattttctagctattttctaataatgaaggacaaggccaggcatggtggctcacgcctataatcccagcactttgggaggctgaggcaggcgaatatcacttgaggtcaggagtttgagaccagcctggccatcctggtgaaacctcatctctaccaaagtacaaaagttaggtgggcggtgtggcatgggcctgtagtcccagctacctggggaggctgaggtgggaggatcacttgaacctgggggcagaggtttcagtgagcctagattgtgccactgtactccagcatgggtgacagagtgagaccctgccgaaaaaaaaaaaaggaaaagaaagacagaaggactgtccctccctggactgtcaggggatgggctggagggggtccttctgggggacaaggaaagaagctggctcaggaccagggcatctctttaggcccagctcagagtgaagccaggaagggtggctgtggggtgctggtgattgggagcctctgctgtcactgctgttcactgcagagcaggactgtgggctggccccatggcctgagccccaggactggctgggtgggggtccgaagggctggggcacctgccagcctctcttctatgctcgactccccctcctctctgggatcctgggctgagactctggctgggaggggcttaccctacactgaggggcaccccgtctccccaccccctgcactaaatcttcccttgtgtctcaatgtctaggggtctctaaagggaagggggcctctaagcctttttctgtcttcccccctttctgatcctgggtctcctcatctttgtttctgactttctctgcctctctctgcgctgtctctatcttgtctctgcctttctcatgctttctgggtctctggatctctgtttctgaccatctctggctggctgtttctctttgcttccctctccctccctccctatccccgtgctagttctgggttcggtgcccttgtcctctttcctgggcctggatggccctctatctgggccggtcccttagaggccgggcaagcgtctcctggagaccgcctctcttcgccaggctgggctctgacgtccagctctcaggcagcgctcgcctctgcctcagcccggttgcaggtctgtggcccttgagcgaggccgccggggcacccagaagggagcgcggggtgggtggtgggaagggggaggggcgagggggcggaccccggggggggcccccccacaccgcgctcggccccgcccccggccccgcccctcccgggtccctgccggcgcccccagccgtgccccggccgcagagccgccgctgccacccgatgaatggagtcgccttctgcctggtcgggatcccgccccgcccggagccccggcccccacaggtgagggtgctgggccagggaagtgggcggggccggtagctgctggggagcgggctgccaagccagggtcgctgcgaccccgctcgccctgcacagcctggggcgcacggtgggcgcgggcaccgcgggcaccgctgcggggagattcagctggtggcaggcccgggagggggcccgagcaagagctgtccggggtagaggggtgggaaggacggaagcaggcaaggggtcgggacgggcacggggctgtcaggacagggggcacagacccaggtggcggtgccaggcccccagcggctgggcagcgggggcgggaggcccgcggcttttgttcgggtttttcaggcggggcgcctgccgccgtttcctctgcccgagttttcgttttccgttggcgaggccccggcacagctggagggagagggggtgggggagggggttcccggagcgggacgtcctccactaaggcgtccggacaccccctccccgcgccacactcgccccctgccgggtcggactgcgggacgggttgccaggcgcggttccgccgccctcctggatcctggggaagttctagacacaggcccaggaccccgggctctgccggcgaggctgccctcccctctgccctctccgaccggctgtgggtgggtcagagcgcggggtgccaggggcattactcagcgctgggctgctctgcctgggttctttcatctgccagctgctgaggctggggaggggccagcaggggcctcccagccccatccccccatcagggccattcccttacctctgagcctggctgcccgccctgcaggagccccccagcaggcctccctgctcctaagttgaagggttgaacactgtcaggccaacagtttccctgagctcggaaaagaaattccccggggtccaggttgaggtcaaggccagggctgaggcctgttcctctttagacagggctgaaagacttggggaccctcctccccagctttcccggcagtgttgaaggtgggatctggtgcttgcaactcttttggagactggtgtgttccttggttgctggatgtgtgttcagttctccctcaatctgcatctctccccgactcccttcagccaaagtgtgtttcctaattatgaacttgaaattcaggatggacggggggtgggggtggaggtcatgaatccaagcatgagtcccttggattcaatcccccaccagcaacacatacttcatctctatcccctgcacccctctctgtctccaccccaaccctgcggcctagctgggggtgagtggcttttgatcccatgtggttctcccctctgccagggcaacagaccccattccccaaagtgacagctctcactgccatgtgctccttggcatgcgatttgaatctcgattatataaccagtcatttcgcctccaaaggcagcccaaaggcccccggccccagcggcttcttccacttgcccacagtgtggttgggtccaccccaaggtggctgggaattccaagatcctgcatctgaggacctgacctcttcttgggaaccatgggagcagtaaatcctctacattcagtgctggattcaaaggcctcaataataataaacaggaagaatgggagtgggcagggtaggtgttggtgtcccatttcacagagagggtctgagcctatgtagtgacagtgcccaggcaagaacccaggacacttgagggtagtcagggcacaagatgaagcttggggaggaaagctgttaggaaggtgtctgactacgggaataggtcaggcttgtgtggatcccagcccaagcagagaaggactgggtggggggaagaggccctgtgcttgtgcccctctcctcgggctgaccctggctcacggggaagaagtgcagcattcttggcatggatgggagtgggggtgagggagggtgctggttctgagcagagcagtgcaggagtgggtagtggattgcttcatcctacattgcagggatactcagaaggacttcttgatgtgtaaggttaaaagagagactacaaagcagcagcatggaagaagttacagtgtgagggactgcagttagatactcaggagaacttctagggaggggcttgtgacccacagcatcccaggctagccatgcagggaagtttcctccagtatagtgggtcaagtggattcttgtgaagttggattccaatgtagaaacctggagatggtcattggagatatcaaatattccagcaaatatattcaaatgagcactggtgcctggaaacaaaaaatgtgtttttaagaaaggggagttgctttcacagtatagctcatagttaatacacagacagcaaaaactcctggccagtatttataaaaactacctcatttgatcctcacaataccactaagaggtagataccattattatccccattttacagttgaggacactgaggcatagccaatattgcagcccaaatcacacccccagtgcactgtggagccagggtaggaatgtggcagtctggctctagagtctggctctcaccctcactatctggcttctcaggacctgctatgtcccgctgtcactcccaccccaaatccgtgtccattttctacacagcccaagatcaaggtcagcttctggctggattgcagcttagttgcttgtcttttgttctatttctttactcctccaatctttcccaccctgccccatgctagcccatagcactgggccagggctcggttcactggtgttttccttccaaaggggcatgaagccctgctctgttggctgcaggggttcaaaggtaagatattggcttggtcagggatttggacaaagcctggttttaatgatcctgctctcaccatctcgggagagagacatgaatagggcctgtgggagctggtgctgcctttcccctagcaccctccacccgcttcaaacaacccgccttcagatccaggcccccctgtttcttgtgaaattgtgccagtttgtcagcagggcagtaccaatctgtgccaggtgggtgtctcctcccccattgcctcagtgggacatcaggctgagatggccttggggctggactttggggagattttaaagcccttttgggttggggtgtatttaccacctgtcagagtgggtgaggaccaaaggggtgatcgtgtccaactctgttacgctacagtggggaaacagactggggagtgcccaaggtccctcagcctcggcagacaaggacccatcttctgactcccagctcccaggccatgcctttccctctgtggttggttctgtccttcgtggcccccctcagtgcagggttcatggactgggctccaagagggagaggggagggcagggagctgcagggatgagtggacaatgtatcctgttcatctctgtgtccccagtggccagcacagagcctggcacagagcagttctccataaatgtttgtgaagtacaaaccagggaacagccccgcctgtggccccccagggcgccccatgcccagctctacccctgacactgtgatgttccatctcatatccgtctaccctaccaggtaggagttatttgaggccgagaaaaatgataatagcaacttcttccatagtgcttaccactatgttggtatattaccatcaccccacttgacagattaagaaactgacacaggccgggtacagtggctcacacctgtaatcccagcactttgggaggccaaggtaggaggatcacttggactcaggagtttgagaccagcctgggtgacacaaggagacccaatacctacagaaaaattttaaaaattagctggggccaggagcagtggctgacacctgtaatcccagcactttgggaggccaaggcgggtggatcacctgaggtcaggagtttgagaccagcctggccaacatggtgaaacactgtccctactaaaattacaaaattagctgggtgaagtgacacacacctgtagtcccagctacttgggagcctgaggcaggagaatcgcttgaacctgggagagggagattgcaatgagccaagatcacgccattgcattctagtctgagtgacaagagcaaaatgtagtcttaaaaaaaaaaaaaattagctgggcatgtagtcccagctactcgggtggtggaagtgggaaaatcacttgagctggggggttcgagtctgcagtgagctgtgattgcaccactgcactccagcctgggcaacataatgagaccctgtctcaaaaaaccaaaccaaacgaaacaaaaaagctctgcctgccttcagcctgctgaggtccaaattttagatgtactccttgttcactgtgtgcccttggacaagttacttcattgttttagcctcggctttcttttattcttttgaggcagggtcttgttctgttgctcaggctgaagtgcagtggtgtgagcttggtacactgcagccttgaactcctgggatcaagtgagcctccctcctcagcctcctgagtagttgagactacaggtgcatgccaccatgcccagctaatttttccattttgtattttttatagagacagggttttgccatgttgcccaggctggtctcaaaattcctggactcaagtgatcctcccactttggcctcccaaagtgcggggattacaggtgtgagccaccacacctggctggttttcttatccctgaaataatccctcaaaattacagagagggctaaatgaggtagtattggtaaagtggctgagatttagtaatctcaattattggtagcaactattattaaaaaaaatcaatggatagaaatgagaacaatgcacttttgcctcagtaaaaagtactgacctttatggtcagagcaatctaaagagaaagtgacctgcctctggaggtaatgaggcccccatcactggaggtgcagtgaggtctgggcaagcacaggctggagaatgatgtgcactagagagaattcagcaaaggcttggcacaggaaactttaagggccctgccttgggatcagcactatatgataggaaattagaggagcaggtgaatcctacttcctactgtggggcattgaggagagcaggcagagatgtccccagcctctgggaacatcaggggttggctgctatggtttggactgtgaggctccccagaggataggtagtcctgagaggctgcctggaggaggcctgcaagggtgggtatggttctgataggtgggaaaatgtgggattgtattctaggcccaggaagggcttggtggccgagggacagagaggagcctgggccactggtcctgaggttggccccggggttgcgtcatcatcctcgtgcctcagtctcctgggctgctgggattacaggtgtgccactacacctggctaattttttttatttttttagagacaaggtttcggcatgttggctggcatgttggccaggctggtctcgaactcctgacctcaggtgatccacttgccttggcctcccgaagtgctgggattacaagcgtgagccaccgcgcctggctggattttgtcatcatcctgggtgcccaaggggtttgggtgtatggtggtggcagtggggaaactagtaattccctgtcccgccaaccccccagcttctcctggaggaggagccagggctactcccggtggcaaggagcccgggcccgtaaggagcggaactggggaaagaaagacttcttatgcccagtgcatttgggggcgtccgggggtcggggaacagtggggcctttgtccccaaccgctgggaatctggccgaggagctggccctgggtctggctaggccctcggaaggcaggtcctctttgaagtgaccctttcaaagctcggcctgaatccctgggaggagagacagcatggggcggggcgtggggatgactgagacccaagggccgaggcctgagggatagaaacagacccggccttggcctcttggggtgtggaggttggtcggaggtgtgtgggccggaggaatgtggtgggctgggagaccgcgtgggagccatgtgggaggacaaccacgcaaggggccttagccccaagtgggggtgcacctaggcaggggccgagttcattctggcccgagagtgtttctgtctcctatctgacttctgtctggctctgtgctcctgtatcaacagctgcttcttcctttttaatttccccaaaagtgtgagagcttggaaagaatcgggtgtggacgccagactcagagctcttgggaggagggagaggtggggacctgggcaatccagagcttttcctgcttctgagagcccccgaaggctggaaggagaggctggaggggacacccccacctcccgcatagagtctcccttatgctcaaggtggaggaactctgtattgttcctgaaaagggacagaaggaggaggaaagctacccagagaggggacatcttcctttgcttcagctggaggaatatcagaggccaccctccttccctgtctctccatttgcctcatggggaaactgaggcctagagaagggacaggccaaggggatagagcagagaggaagggaccagcaagagtggaaggaagccagccctgtgtggttggaactgtagggactatggtggctcacacctgtagtctcagctactcgggaggctgagacaggaggattgcttgagaggatggatgccaagtgggaggaggaaggggcctcaggttgttgagttgtcataagagggttgtagagaagtgcccagagtcccttcagctctgacctgcggtgattccatgaaaagagggagaggaaggagtggttcctgctggtgagttcccaaggtccaagtagaaaggggcaccccaggcttttggactgagcaatgcacaggggagcctttggcagcccaagggagaaccttgcccccgaatctgatgctgtttgtacttcttgccctggaacccgatctctccttggcctcacggcagtctctgtactggggaaaattttttgttgttgttgttttcgagacagagtctcgctttgtcacccaggctggggtgcaatggcgcgatctcggctcactgcaacctctcccgggttcaagagattctcctgcctctgcctcccgagtagttgggattacaggcgccctctaccatgcccggctaatttttttgtatttttagtagagatgggcgttcaccatgttggtcaggctggtctcaaactcctgacctcaggtgatccgcccgcctcagccttccaaagtgttgggattacaggcgtgagccaccgtgcctggcctgggaagattcttataaatctccctttcctcttctggaggtgtggccctgggctcctccccaagagaggtggaggagggggcggaggccccaggctgcaatggaggctgtctgcgcactgttatcttgcactggcatcacagagctgagcttcattagctctaatgaagccttggcactgtgcccctcccacacagcacctagacgtttcaaggaaggcgagggggacagctgaggttgggtccagagcccaggagatggtcggggggatgtttgcaagaggagagggtaggaggcagaaaatggggaccacacaaccaggctggggttgccaacatgagggagaaacagcccctcttccttccccactgggagctttttcttctccagtggcccagaggcctaggtacccccagtgctagggaaagccttatctgagagacgggatgtggtctggggatgctgaggatattcccctcagctacccctacccccccaaaaaaaacgctgaggagagtgcccctcctgccctctccgtaatttcagccgggggcaggagaaggccctgatcccagcatgggaggcccagggcttgggaaagtccgccagtgggctggagccgaatcgaacccactgtcagtggtgatcactggttgctcgtgctctgcgttccaggctctctcttgggacctggatgaatgagaaacaaccctgctctcaagggcctccttgtctgcttttcctaccgcccaaaagccagacaaaaagtctccacaaagactgtagaaccatgagttctaagatttgcatccagcccatcgatcagtccagaacacccctcaggggccccctgccaaaaatattaatgtaaaaacggcccagtctgactggggtgatggacctgcagcctacacaagccaatgtcttcaccatggtaatcgttggaaagtgagtgtggtcacaaaggcgataacgggagtttaaaactggaagccggaagctgggtagaattgccacagggattggttaaaaaccagttggtgatatgattaatctcctttctctcatctgtttccaaatctatcattaacctgaggattctatagtgaaatcctttttgatcgattttcaagtgccgtcataaagggggtgtataattacagatgcaacgactgagacctggagtgggcaaataacttcactcaaggtcaccaagcatcaaatttcaagctgggccaggcatggtggctcacatctgtaatcccagagacttgggaagcttcgacaggaggattgcttgacgccaggatttttttttttttttgagagagggttttgctctgtcacccaggctggagtgcagtggcacaatcaggcacacaccaccatgcttggctaatttttttgtagcgatgggggtctccctatattgcctaggctggtcttgaactcctgagctcaagtgatcctcctgccttggtctcccaaagtattgggattacaggcatgaaccaaagatcaatttgagaccaacatgggcaacatagcaagaccctgtctctaaaaaattagccaggtgtggtggtgcacacctgtagtcccagctactcgggaggctgagctgggaatattgcttggactcaggagtttgaggctacagtgagctatgattgcactgctgcactccagcctggacaacagagcaagaccctacccacccctaccccccccaaaaaatattaaagctgggtctttcagaatcctaggtctgtcattgtggtgactgctgtattctctgacaacaaggagcctgggaggacacccctcacccagggaagttagaccctcttttccacagctgagccctgaaatccaagcaaaggttggcataacgaaggggggggagggcagatgtaatgggtggtgggtgcagagagatgtagattaagttctgcttctctgtgtcttctgtgattcagtgtggagtctggatttgctcgtgagtggcgtgggggaccccagggttctgtcaataaacatggctgagcccctgcctcctccaaagatggtccagctctcaggggaagaaggcttcactgtggggagatgaggcttgccaaagcttgaaagatgtttgctagggccaggcacggtggctcacgcctgtcatcccagcacttttgggggccaaggtgggcaaatcacgagggcaagagatcgagaccgtcctggccaacatggtgaaaccccatctctactaaaaatacaaaaattagctgggcgtggtggcatgcgcctttagtcccagctacttggggggctgaggcaggagaatcacttgaacctgggaggtggaagttgcagcgagccaagatcatgccactgcacactccagcctggtgacagagtgagactccgtctcaaaaaaaaaaaaaaaaaaaagatgtttgttggggcaagaaagggatggaggagaagggagagaagggtgtgccaggcagagggaccaagcattagcacaggcaaggaggcatgaaccagcttggcctcttaagggattgatgaatacaaggcccagaatagagggaggaggtcaggttggcaaggccaatgagaccagatcccgccccttccctcccccatcaggtcgtatccctcatgccatactgaggaacttgctcccatagctactttggagccacacaagggtctcgggcagtggaggcagcagaccaggtgaaaggagatgggagctgaaactggaggtacagttggaagggtaggataagagtggagtatgttggctgggcgtggtggctcacacctgtaatcccagcactttgggaggctgaggtgggcggatcatctgaggtcgggagtttgagaccagcctgaccaacatggagaaaccccgtctctactaaaaatacaaaattagctgggagtggtggcacatacctgtaatcccagctactcaggaaggctgaggcaggagaatcgcttgaacctgggaggcagaggttgtggtgagcctagattgcacctttgcactccagcctgggcaaatagagcgaaactccatctcaaaataaataaatagatacatacatacataaaaatacaaaaattagctgggtgtagtggcgggcacctgtaaatcccagctacttgggaggctgaggcaggagaatcacttgaacccgggaggtggaggttgcagtgagccgagatcgcaccatagcactccagcctgggtgacaagagtgagactctgtctaaaaaaaaaaaaaagagtgggagtatgtcaccctcttcccctttccagaaacttgctgtaccgtctctttcccttgtctagaagggccttctctgccttttccatttctccaactcctattcctctttcaatgcccagttcaaatatcttccgtaaagcctccctccaccactcaaatatatggcgacttcctcctctgtgcgctagaccttgtgccccgtgagggtagggactttgtcttgttcactgctctatatccagcttctaggccaggccctgttgagtgaacgctgctgactgatgaattgagtgttcccatagcacttgacactgcattgcccaccaataataataacaatgggagtattggttatagcaaacttgtattgcgggcctcagggccagacactgctgtgctgagcactttacacacaccgtctctttaatctgcacaacaatcccatgggcgatggattatctctatttaataactgtggaaacagaagcttagggaggttagtaatttgtccagtgacatacagctaggaagtgggcctgagtcaggattcaatccagcttcctctgaatcctgcttaggaactttttttttttttttgagaccaagtcttgctctgtcacccaggctggagtgcggtggcgcgatcttggctcacttcaacctccaactcacaggttcaagcgattctcctgcccggctaatttttgtatttttagtagagatggggtctcatcgtgttgaccaggctggtctaactcctgaccttaggtgatcggcctgcctcggcctcctagagtgctgggattacaggcttgagctaccgagcccagtcggaacttttttttttagacagtcttgctctgtcacccaggctggagtgcaatggcgtgatctctgctcactgcaacctcctcctgggttcaagcgattctcctgcctcagcctcccgagtagctggaactataggcacgcaccactgcatctggctaatttttgtatttttggtagagacaaggtttcaccatgttggccaagctggtgtctaactcctggcttcaagtgatcctccgaactcggcctcccaaagtgctgggattacaggcatgaggcactatgcccaggctctgcttaggaacttttaaacactatgccctacagcacctttatttgttgcatgtctatgtctttggttttataaaaccagggactgcttttgttagtttttgaaaatcctcagactacgggactgatttgttgagcaacttctacatgccaggcactcaatgctgagtcctctccaggacccagtttacagctgaggagactgaggcttggagagggaaaggacttgaccaaggtcatgcagttgggacctgaaacctggcctctgactcgtcttcccttgtgtcactggcccccctagcccggtgccaggcccttggtggcacccagtgaacagtcctagaatgaaagaaagaggaaccggctctgaaggtgactgctttctttgggggcacacaagtggccggacaggggccgtggactgggcctccagcctctaagcccagtgtgtgtcccaccgggatcactgatgaggagagggatctagaggccgggactggggatgtcgtaatttccaggtgcccagctgtctgtcagacctgtgagctccaaggagaggctgacctggtgctggggtggtcagagatggtgtccagggcaggcagagccttaccacgacctttagaggcctccagaggctgcacagcgtcagtgggattttggccacgggtgaccagaaggaacctccaagcctgggaaatgcagctgcagtggccacagcgcaggtgggcagaggccctgggttgtgctgcaggttgggcactgccttttgctgagtgaccattcggcctatgctcccagccccacagggatccaccaatcagacctgcctgctgctgtgtatttgcatctcacttgcatgacaacaccccttgctctgtccccaagtgtgcttccccagcccatgccccattccccatttcaggccccctgtgcagagctcccgtgggaggggcagaaaggcccacctgggctgccagcctggcgcactattcatagctcagggctggcgtacttcacatacttggcgtttctcatgtctggctggcccaaggcagccacccctctgttgtcctcccctccctcctctcttctctctttcccccttcccctcctcccttaacctcttcccccaccttcttcctctcaaccaatcttcctgaaatctacagatgtccaagtccctcatcatggaagagcccacataaggaaactgaggccccagagagggcggggactggagggagaaaccagtagtgatgaggcgtataatgaggtggccgagagtctgggctctgcccacagcttcaatcctgagctgacattagctgtggcaccatggcagattccttagcttgctaagttaaacaagcgtttcagaaagtcaagctgagacctggagggtaagggttgagtcaagggaagaaggggacggggagggggcaggcaggcactgtattatagtccagggagaggggaacttggatgtggggagcaggctctgagtctcaggacaagggcttggcacgttgcagaacccacgaggagggctcgtggctggagtgtggccagctggggtgagggcacagagatgcaaagaggattgaagcagctcccccctttttccccacccctttctcccccactccttttttttgagcctggatctggctctgtcgcccaggctggagtacagtggcacaaccatggctcactgcagccttgaactcttggctcaagcaatcctcccacctcagcctcccaagtagctgggactacaggcgtgccccacggcacctggctaatttttactattatttttgtggagatggggtcttactatgttgaccaggctggtctcaaactcctgggctcaagggatcctcctgcctctgtctccccaagttctgtgattacaggcatgagccaccatgcccggcccccctttcttccttattccagcacccccgacttctggatctggttccctctgaggaaggggtggggatataaaaagcccctgcctctgccagacccctcctggggacagggttctggttacctctaactctctgaggaaaggctcattcattctccaacatttagaaacagtgtgcagagcacccaccctgggccaggaaccagggatttgaccaccagcaaagcagacatggtccttgccttccaggacctacagccctgtggggagatgttggtcaaaataagctcataaataagtagacactgacaagagggtgcacaggtaactgacctggtctggggccagaggaggtgtgcctggggaagtgacatttttgttaagagcaacagggtgggtaggagtgaatcagggcatgggttgcattccagaaacagcatgtgcaaaggacccgaggctggaagggtgcctggtcctcacaggaggtggaaggaggccagggtggccagagcacagaggaagagggtgtggtgagtgtgggggccaaggcgcgtcccacagggcctggtggtcataatattaaaataatcaatctggactgtcagatgccagagaggtgactgccgcttggagcagggcaatggtgtaatgaagtgagcagactccagagacatctaggaagcagagtctactccgatggggggatggagcgctggggccataatacctgattcttggttctcagcaactttttcaggctgctatctctgtctttattttatagctgaagaaataaggaaacttgagtgaccttgagtgatgatcttgaggtcacacagccagaaaagggccagggccagtaccaatggcaagtgtggccttttctctgtgttagccttcttgatgccaggacagtggtcactttctcaccatcctccctgtccccaagcctcggtgcccctgcaggtcacccagcattccctgcctagcacccaacccggtggagagccaggagttgcaggtggtgggtgctgggtgctaccttcatttccagaggttggttaaatgagttagcgcatctaacagcagctgcctggggcatagtaagcactcagcaagtattcttgactgtgtggctgttatcctgtccccaaatgtggggccaggcaaactggcagggggaggcgggaggaggatctggagtgaggatgatgccatctgtcttcttctgaccagagagcccagcccagggggctccctcatggtagtgacccaggggaggctgtttgtccctgcagagccactgtccctgccacctgtccagctgcctctgggcatcacagactggattagggagtggttcagttcataggcagggccacatgtgtgaaggggaaggcaggggtaaccgggagggatgggcagggctggggtgagggggtgggtggtttcaggggtggggctgacagcctctccctgaagggagccccatgtgcccccgggagactttcggaatctgctgagacctgccctgggaggggacatggtcttagcttgactgggacccagctcttgcctgaaggaaaccagtgtgtgcacctgttacctctgcccaggctgtcagacaacaggaagcactcctggggggcggggggcaggcggagtcacacctagagctttcccctagtctcctctgaaatgcactgtccagcgtgagaccaggggatggatctgctgaccttagagaagagtcattgcaggcattcccctgcctctaggaatgactgctccagtctagtctgaaaaggggctctggcctctctccttgaccaaagggagaccccgagattccacagttgctctgtccttctgcaggagattcttctcctttgtaggagatggggaggggaagatcccagggcaggttggagctgaggggcctggggagcgaggttgagggaatgaggacccttctgctcgctctgggttgtcaaggagacgaggcatgccagcgctgggccagcagggggctctgctggccacgggacctgcctgccaggcagccgagatgtgcacccttcattgtgcgggctcatttccaggagtgcctgagaggacgcggcggtgtctctgtgggcacacccttgtgtgtatgttacaggtgggtgtgagcgtgtggcgcgttggaatgggcatgtgtgtgcttggtgggtttgagggcccccacactgagccaggtttctgccaagaaaactcttccaagttcctgccggcagccttggaagagtttgtgcatgactggggatggcagcctctgtggatggcaggcccccatcaacgccaaggacctgatgcgtgccaggttcaggctgggcgatccccctgtgcggggacctctagggctccaaagatgacagtagagactctgaggaggtgcagtggagaagggacggcagggaaaggtcttccaggcaggaggtgcccagctcctgggcaacctctgtgggcagagacttctcctgggcaccaaggagagacctgttcatttgtttcatctttcaacattttttttttttttgagacagagttttgctcttgccgtccaggctggagtgcaatggcgtgatctcggctcactgcaacctccacctcctgggttcaagcaattctcctacctcagcctccagagtagctgggattacaggcacctgacatcacgcccagctaatttttgtatttttagtagagatggggtttcaccatgttggcaaggctggtctcaaactcctgacctcaggtgatccaactgcctcggccttccaaagtgctgggattacaggcctgagccaccgtgcctggccttttattttgtgtgtgtgtttgatttctgacttggcctttttaaaaaaatcacaaaatatataatacggccgggtgctgtggctcacgcctgtaatcccagcactttgggaagccgaggtgggcagatcacgagatcaggagatcgagaccatcctggctaacacagtgaaaccctgtctctacttaaaaaaaaaaaaaaaaaaaaaaagatagctgggcatggtggctcgcatctgtagtcccagctactcaggaggctgaggcaggagaatcgcttgaaccggggaggcagaggttgcagtgagctgagagcacgccattgcactccacactccagcctgagcaacaagagcgaaactccatctgaaaaaatatatatatataaaacaaaatttataattttaaccatttttaactgtaaagtggcattaagtacatccatattattgtgttatcaccataagtggtgatattccactatcaccgtaagtggaataatataatatttattcattcattcctttttttttttttgagacagggtcttgctttgtcacccaggctggagtgcagtggtgtgatcacggctcactgcagccttgacgccctgggctcaagggatcctcccatctcagcttcctgaggagctgggattataggtgcatgctaccacgctctgctatttttttattttttgtagagacagggtttcaccgtgtcgtccaggctggccctggactcctgacctcaagtgattctcccacctcagcctcccaaagtgctgggaatacaggtgctgggattacagatgtgagccaccaagcccagccaatattaatcctttcacttagcataatgtcttcaaggttcatccacattgtagcatgtgtcaaatatctttcttttttttttttttttgagacaaggtctggctcccctaggctgaggtgtagtggcgcgatttcagctcattgtaacctccatctcctgtgctcaagccatcctcccaccttagcctcccaagcagctgggactacatgtatgtgccaccacacctggctaatttttttttttttttttttttttggtagagatgttgtttcaccatgttgcccgggctggtctagaactcctgggttcaagtaatcctcccacctcagcctcccaaagtgctgggattacaggtgtaagccaccccgcctggccttcacttattttaaaaggctaaataatacaattattattattcatatcatgtatgtattatatgtaatacaataatacagacaatttcattgtatagatatacctcattttatttgtccattcatccgtagatggacacttgggttgcttccatttcttggctgttgtgaataacactgctacaaacatgggtgtacaaacatttcttctaatccctgctttcagttgttgtggatatatacccagaagtggaattactggatcatatggtaattctgtgtttaatttttttttttttttttttgagacggagtttcacttttgttgcccaggctggagtgcaacggcgcgctcttggctcactgcaacctccgcctccctggttcaagcgattctcctgccttagcctcctgtccatgtttaattttttgagaaactgccatactgatttccatagcaactccaccattttatttatttattttttattgcttttttagagagggagtcttcctctgtggcccaggctgaagagcagtagtgtgatcatagcatcatagctcactgcagcctccaactcctgggttcaagggatcctcccacctcagcctcccaagtagctgggactacaagtgtgtgccatcacgtttggccaattttgcattttttataaagatggggtctctatatgtttcccaggctggtcttgcactcctggcctcccaaacactgggattacaggtatgagccactgtgcctggccacagacacaccattttacattcccacagcaatccaatttctccacatcctcaccattaagaaataatttttgagctgggcatggtggctcatgcctgtaatcccagcacttcgggaggccgaggcgggtggatcatttgaggtcaggagttcgagattagcctggccaacatggtgaaaccccatctccactgaaaatacaaaatttagccgggcgtggtggcacgtgcctgtaatcccagctactcgggaggctgaggcaggagaatcacttgaacacaggaggtggaggttgcagtgagccgagatctcgccacttcactccagcctgggcaacagagactccgtctgaaaaaaaaaaaaaaaaaaaaaaaaaaaagaaataatttttgagagcccgctatgcacaaagctctctaggagggcaaatccattctgaaaacccagcagccattgtccttagggagctctcagtctaagggggagactcaggccaggcccttgggcatcctccaatctgaggggaaagacacaggccatgccttttgggagaccctagactgatgtggggcaaaaatcccttgttttcaaggagcacacagtctgatggaggaggcatagcttcttccctttgaggagtctgcagacaggcctagagaccagaatggagaccccagagacagccaagggctgctgagtgggtaaatcaggggtacggaggggttgtggtaagccctgtcccaatgccagcctgctgttgcctgggcaatggccctggtgtttactttgtggctggctagacgcacccttttctgtaagtgctcatttcccaccaagaggaaagaggctcctctttagtttccccttcctctgttgtccctgagggaggaactggccctcctctggcactggagaccctgccagcctggcacctttgccatgctccttgcctgctgggagaggccccatcctggggtctcatgttgcccaccccttccctactcccagagggcccataaggtagtgctctgggcttgccaaagttcagccaaggaagtgggagatcctactgaatcctccctgcttgggaggaactggggcacgtcaagagcctgtaggaacctgaggctggcagtgggaggtgggggtgatgccgggaaggatgagcttgcctgggtctatgagcgtccacatgtgtcaccgtgtctttgtgtatccatggctgagtgtctgcatgtctgaatgtcagtgtgactgtgatgactatccaaaaagccgtcgaaacagcctgcatttattaaatccctactatgtgctctgagcctgtgctaagactttctttaatttacttaatcctcccaacaacctttgaggtggaaatacatgtcattaccattttattgatgaggaaccaaggcttaaagaggttaagtaactcacccaaagtctcatatctagaaagtggtagagatagggctctgactcagcctccagaggactccagatcccgtgtgtcagcccctgagctgtgctgccactgaaagaacttggggagttttttttttttttttttttttgagacagggtcttggtccgtcacccaggctggagtgcagtggcgcgaacacagctcactgcacccttgacttcctgggctcaagtgatcttcccaccttagcctcctgaatagctgggaccagaggtgcacgccaccatccccgattaatttttaaattttttgtagagatggggtcttgccaagttgcccagcctttttttttttttttttgagaccgggtctcacactgcagccttgacctccctgggttcaggtgatcctccccacctcagcctcctgagtagttgagaccacaggcatgcactaccacacctggctaatttttatattttttgtagagacggggtttcgctgtgttgcccaggctggtcttgaacttctgggctcaagcgatcctcctgccttggcctcccagagtgctgggattataggcatgaatcatcatgcccagacagattttgaggattttgtgcatttggcattatctcagcccacctccctgatggtggtgggatgtctggagtgacaagtgcttcctcatctcccttcccaggcttccgtggctctggcctagtttgagggagagggagcacagtccatcctaaccctgggcaagagtggccctacaggggaagagcactgggtctggggagaccctgggaaccatcccctacccgtgggccagacatagtgccagtgcggggtgcccaggttcccggtgatgggggttatgtgtacatggagggcgctgcggagacacaggcttgcttggccggctcatcaacttggcctgctggggcttgtcaggcgggagtctctacccaagcaatgctgggaaccaggcatctgaatggggcaaaagggtggaagaggcctgagggggccgccgcccttgactgaggagactggagcagggttcagaggcccaggcgtgggcggggcgggcatgtgtcagtatcgcattgcctgcatgcctgggatgcacggatctgtggtgggatttgccctgtctgtgtgcgaggttgtggagtggtcatgggtctgcgtttggtggtgtgcaactggtgtacaggaccagatggagcttcaaacatgctggatgactctcttggggtgggggcattgtttgtcacctggcagtttggggcccacattctgggaagagtgctgagcaagctggaggaaggaaaagcaggcagaatcgaccctgagcccctctctcacttccttaaccacacgccctgcaacacgtcagtttccttcttgctcctatctctgacccttgggactcaggacgctctcctccccttccccagtgcctacttgcttctactcctccagtccagaccatcctctcctgtgagggatagcctgggaggtgtctggccccaccctcaaaaaactgtcacctcccagagagaagaggccctgtgcacctgagagcagggctcccttggtttgtgggggtctcccttggtgggggtgaaggcagccggctttggccagagtctagaacttggggatccctaaaggtttcaggagctgggacaatattcctgaaagactctccaaagtatctcagctcctggcccacagcaggtactcaagatgtggttaaacaagagggtaatggaaaaggatctggtaagcggttagaaccctgggatctggtcccagcttagtgaaaatgagtccttgaactagtcacttgttctctttgagcctcagtttcttttttaaattttattcttatttatttatttattttgggacagggtctcactctgtctccctggctggagagcaatctctgctcattgcaacctctacctcccaggctcaggtgatcctcccacctaagcctcctgagtagctgaaactacagacacgtgccaccacacttggctaatttctgtattttttgtagagatggggtttcgccatgttcctcgggctggtctcaaactcctgggctcaagcgatctgcccaccttggcctcccagtgctgagattgcaggtgtgagccaccacgcctggccaagcctcagtttctgtaactgaaaaacgggtatcaaaaaaatctctggttatctgattcttagggtgtcaaatgagaacaagtgaaagtgctttcaaatggtaaaagacaatgatctcttggaaggagggaagactggatgccctccctttggggatgcagccttcaagcccctccccagggaccctcaggaagatgaggttgaatggattttgcaagctggtcaaactagagggggatggaaggggcagctcagcagggtaatttctgatgcagggggaggaagctgggcagggcgtggggggaggactcatgctaggcaggaaggcttggaatagaatctcagctacgcctggtatttcccagccctgggccccctccgccaccaccctctggggcccaccccacattcctttcccagaggaaatgggggagggagcggagaggctccccaggcctggaggatcatttattcaagctacataacctttgaggccccactgtgtgcactctccccctgaagtccccacagaggcagctgggtgtggaggtggtgggggtggggaaggaaggtgtggtttgtgttggaggaatctgttacctccttggctgggccttgctcccctgccaggttagagggcaggaaatggacattgtatatggttgatcctttccaaggtctctgcagtctgaacacagaaaacccatgttgcgtctccacctctctcctccctgctgtcccagaaccctcagcggttttgaattccgcagaggtggattcttgatctgggcacacagcagcacctgttggccatcagaggctccatgggggatgagaggggagagtcattccatttccttagaaccagggactggactagcagcaagaggaatgcaagttaggcacctgaaaggacttactggctgcttgctgggaggagaggccagacttggagctgaagacatctggttgccctccgcctggggccccagagtctgacatggctggggacatcttgatggtggttccagctggtctaggagggtctggcctttggagagtatgacggagtcacagggcaggtcagggcaggagtggtcccaacaccgaatccttagttttctagcgatggaagtggggcgggagagggtgccaatggagatggcgcgtcctgctctccccggctgcagtcctttcccgctctccccctaagctctcctgactcagctcgtggcagcctcactcttcccatctggcttccgccagggtgggggtggggggtccagctcttgcacggagggggagcccagcaaacaggaaacaggagaacaaaaccagctccctggctgacacaggcagccgcccccacacgcctcaccctcacccttcctctctcttcctcctccctcccttgatcccgacctccctcgtggtccgctctgctcccttccccctcccctcccacctccgtcccctaggctcccttcccgtccctttgcttctccaccttctgacactttgttgtctgctgccttcccctccctctgcccccaggcccctccccatctctgtccctccatctcccccccaacccccttgctggatttcctacctccccattgggccaccctcccgcaggttcttgctggggacagtggatggtggaatgggagggaaggggagctgcatctgcttggtgctcccttctggtagctgcctcaaaaaggtccaacccttatgacgcttcctcctggactcctcctagattcaggagtggggttgggctggagctgccccgctttcctggctgctggctaggattttggtgtaggatagaagttgggatgagaggccctggggttggagtcccggtgctgccataacaagctgggtcctcttggacctcagtttccttctctacaaatgaggccatagaaatggccccgggccacagtaagtggctgtggtgatattgttggtgaacagtcaagtgggctagaaatggtgatggtgattacacatccactagccaaggcctctgctagccccatccggatggggcctgggaagagcaagagccaggaaggcgagcagggcaggggctagcacaacatggcgcttcccatctggctcacatgccagggggtgggagagggggcagctttgaatgattgtcagcttgtagtgaccctctaggtagagctaatgggtagggagtcctgggaaggagggtggttcccacaggggtgttggggactccatctgcgcttaagagtgtgtggctgtcactctgtgcagggcagtgtgtgtagcactcgaggggctgtggcatccatgcctggagtgcctgagctgtgcagtgtgtgcgtggcatctgccatgttgtgggggtccctgtggggtatgtgtggagtgcgtgggtgggtaaatgtgggtctggtgtgcttgcacatgcatctctctgagtatgtggaccgtatacacttgggcggatgtctgaggtgtgtgtatacgatgtggaagagtgtcctgtgtgtgtgggggggatagtgtgtttctggggtatgtccacatagggtgagtgtgtgtgggcaggtggatgtgtgtggtgcgggtctgtacagagtgggtagggtgtgcagcagagtgagggacacctggagcatgtgtggctgtttctctgggtggatggggctgatgcgcgcgcgtatgcgtgcgtgtgtgtgtgtgtgtgtgtgtgtgtgtgtgtgtgtgtgcgcgcgcgcgctggaagggtgcaaggtgtgcgggccgggggagagtgcgtgtctgggtccagggctgccgtctgcgtgtgagggtgcgagggtgtggtcgtgcgggggactgtgtagtgccctggcgtgtggggtgtgagtgtgagatctgggcggccgcggacaggggccgccccggagggggaggcgtcagccctgcgagactcgcgggcgtgtcggggctcgggcgccttcagccgggaggcgcaggaggcgcggagccaatccagccgtcctgccgccgtccgcgcgggccgtccgtcccttcggggcccccgggccccgggcccgcggctccggggggcgggcggggacccccggggcccgccggccgcccggggggtcgaggacgccgtctgccgggcgcctagcagcggccccgggcccccgcgcggcgcgcgcgtctccggaagcccggcctggggcgtactggggccggggcagtggccgggcccgggagcccccgccggccgcggagctggtgggcagcgccgtgtggcgcgtggagcgcgcgggggccgggggctggcgctgggagcgcgccgtcggcgtggactgcagcgccccggaaccgcgctgcctctggctgccctgcctcagccacagcgaccgccgcgcgcccgggccgcgccgggccagggtgagagccgcggggccggggccggggccggggcaggccttgtcggggtctgagtgggactgggtcaccaactccctgcggcctttgagctgtgtgcgccctgcattccaggactgatgcccctggaacggggagtgagtgaggcacttgagagatggggctgagggtggcaggatttgtggcttggagctctgccagggcttctgggatgacaacccccagtctgggtcgaggcctccacggggctcagccctctcggtttccaggcagtggaaggatggaagggaccagagcgtttgaagagacgctggggcttctaggaatcccagagggtatgggtgggcagggaccccgagttccgaggcaggcagaggcaccactgaatggagcagggcccacgacccaccccacccctggtaggggacctggacacggcacacgagggtttcctagtgggcagaggaggctgagtggcagacgggcccctgcaggtagtgagtgctctcagggctgacagggctgggctgggggactgccgtgtttctgatgtccgggatggaccaggctggtagggtgtgagtcacagtgggcgccatgcccggcctgaacactgtgctccctgcaatgacctctttatgctcccggggggaggagcagggctcctgggttctagtttctggtgctgccaacccaccacgtgtccacctctgcctaatttgtggcctaaggccgtctgccctgctgtcaccatcagctggtatttttggacgtctctttctttcctgacatgagggtgggagtgtttggaaatagatccaggccaggagaatttaatcagcaatgtccctgtgtcccctgagcaactccctctcagtccccttgtctctgtgcctaagtcagagaggcagagctgtgtgtgtgagctgtgcacctttctagttgttatcaatggctccttctgtggtttttgcacctatcacttcccccacctcaagatgagaacaagactcagttctgtcccaggtcacaggggaggagaggaaacatgcatgtattatagcatgaaggattgaggttaaacaaggaagaacttcccacaggggagatgccagctctggcttttgatgggtgtcctggtgtctcctcttcaagcaggtgtgtggtagctgtggctgtgtggtagctgacattctcaagagcctagttggaagaggtgggaggaaggggactggaaggaaggaacagaggaaagggagaggtagagataagggagggaatgctggtagtgcttggtgaggaggggacccggagaggaaggcatgcctcctaccctggattccatgcaggccctcccagggagcagcccccccaggcagctggcagctccaggcaggatgtgtgctgggggaggggcggggggcgtgcggggacctgtcccagccacttctcgtcactggggcagctggtggcttgaaccttaatccaggacagcagcaaaacaatgggccctgcaaacagcctcagctctgagcctgggtgggggacaggcagggggcagcccacactggggaggagcaggggcttctggtaggagagggcagttggtgaggggacccccagacccttttcgctccctgatcagttccttgccaggtcagcagagatgggaaatccgggggatttcagacctcagcagaattcccagagaattttctcctctgggctccccaggcccccatgggggtgcagggcaccgtgggagagactgggctaaagctacaggtggaagatgctggactacccctgatgtcaaaacccctgctgagacctcctggactgggggtcttccagcttttacgtggcccctgtctggtagggggcactcatagcctcatctgggtagttttccagaccgtataggagtagaacagtctagaacggtctgtctcccttgcctggagctccactcagcctcttgtatattccacctggctctgtcccctggggctgtatgaagcaagcctatagcctattgtctctgtcacatttttctttaatcttctgagatgggaggatctagcctcttccccagacctgctcgacagcagccaggctctcccccatgcggaaatccttagcagagggcagctgtctccctccactgggtgtgtggacaggagggtggatggtccatgaatgaacttattggcatcaggacatttgagctttctccagctacgagaaggggacaaaaggggatgttgctagtgaagcgggagctcctcactccagaactgatgagcttcttcctccacacccagcccctcagcctttctcctgtcagctgatgcttcctgcctggtgccgaggaggagttgaggggagtaaggagtgttggtggtgagggctttttgccctctgaggggcttggactaggggcaacatagaggttaggccacatgatgttatggatttaagagtcctctaggggtcctcttggcttttcaaagccaggcagcttctccgtggctcccatcttccccagttgggctccgtgagcaccctctatctgacaccctcctgtcacccaccttccctctctgtgtcccaaagggagccctgtctcaggcactgtttttcttcttgccccagaaacagacctgtgtgccccctccaaactcttgtcttcagataccctctgccacatcatcttggagaatcctgagaattttgggaggtctgacaggaggctttagtgtctctgaaacctccagccttttttttttttgagacgaagtctcgctctgtcactaggctggagtgcaatggtgcgctctcagttcactgcaacttctccctcctgggttcaagcgattctcctgcctcagcctcttgagtagctgggattacaggcgccagccaccatgcccggctaatttttgtatttttggtagagacagggtttcaccatgttggccaggctggtctcgaactcgccttggtctcccaaagtgctgggattacaggtagagacaggattttaccatgttggcaaaggctggtctccacccgccttggcctcccaaagtgctgggattacaggtgtgagccaccgcgcccagccaccccaagcctttctggtgaaccagccaggcctctgggctgggctctggagcctcaggaagtcccttcaggtgtctgatgtccagtccgctccctcttgtttcttggttccccctgtgttcctgctgctgttcttgaaggatgcgtgtgtgccggtctgctgtgcatgtgtgtatctgcatgtctgtgatgcatgcgcatgcgtctgtatgtgcattgtgtgtgcaggactttgattctgtgcaactctgtgcatatctatgtgtctacaaaagtgtgcacatgtgtactcatttgtgtgtgtgtatctgtgtgtctgcatatttgcacatgcttgtctgtatgtttgtggtatgttccgtctacatgagtgtatgtggctggggctgtgtctgcataagtatgtgtctatctgggagtgcatatatgtgtgcatgtgtgtgtgtgagattgtgcatgagctaagacaacgacaggcacttcctgggcaggaaggctgtatccagggtcctgcacatagtaggtgctcagtgaacatttgctgaactcagctgaactgaactgaatgaacttgcttcagtgagttattttcccaagggcaaagacattatgaggggactgaggggaaaggaaagaaggaaaaagctattgggctgatgaaggtgggagagtaaggaaggggtgaggaggaggtcatgggcagggaggatgcctggcaaccctagggcgaaagaccccttctggtgcccctccggtcctgtgggctgcaggaggtggtgcaaacagccagaagtgtcagccacacgggcgctcagcctggcctctctgtctcccacagctgccactgggcccaagagatgggtgctctcctaggcgccccttcccctggcaggggccgaggacgctgctgctgtacaaaagtccccaggacggctttggcttcactctgcgccacttcatcgtgtacccacccgagtcggccgtgcactgcagcctgaaggtatgcccggctcgccgctgccctggtctggggaagctttcatgagggagggagactcttttgtgccagtccccttcatggtcctttcaccctctcagagaggcagtccttcctggggtccggcctgactcccttctgctgtggcctggggaggaggactgcagggaggcagtgccagccttggctgggttatttgtactgtgtgaccgtggacaaacacttgaatcactgtggcctggggcttctcaggagacagggaggggtggctggtgcagggcaaggaccttgcaggtgggcagccaggatgctcacctcacacccccagacgcttgtctctggcaggtgaacagttgtctgggagttcctgggacccctgatctaccggctgcttctgagctggggttgctcctcccctctccagcgtgagctctcaggggcctagcccacctgtgggagccctcccagcacgcccctggcccctgctggccacagctcagtgcgctggaaacagacccaggctgggacacaggagcccagagttccggtcctgggacaactcctcactcattgtgaatttggggctgcctccccatctctgggctccatttctcctgctggaacctgaggacatttatcaacttgacccctcagagtccctcctgccctaatgtaaacgttgtgttctctgagtccaggaaccaggggtcctgaccccaatccaaggctgtgagctagggggaggggtccctgacagcgaagcagaagtgtgggaagaagacagaaggggccccagggagcaaccaaagcccccgactagggctctgctcccatcaccacttcttttccagcagggaggagacactgattttgcagtgaatgaacccctctatccactttccctaggaccgggatctgcctgtacagctattgggggactcccccttggtcccacctatcagagaaccaaacaggggacttcactgtctgtgttcgtgtgctcacatgtctctctgtgtgcatcgcgtgctggccatggacatgcatgtgtgtatctctctgtgtgcatatagtgtctgcaaatacatgtcatgtgtacatgtaactgtgcagctctcacatgcatgccggaagctctggggctcctgcataactgttctcattggctacagctgtgctgaagaacataagtgggggctgatggagtgtggagggggcacagacccctacttcatgcccaaggacaccagccccttagttctccggaacccccagtacttccttcactctttccccagaatgcccctcctgctgcccccagcatcttctctcaggagaccctgctgaagcgtgacagcatagagtctagggctggaagacctagggccaggcaagccagggacaggctgcctctcctttccagaacctgcccagggctgggaggggcctttggcctggaggcaggaggaggctgtgttctcccgtccttcatgctgccacctggcagcctgcagggagctcagccgtccaaatgcatctgtctgcctctgccactctctcgcagtgctgtcagcttgcatcagccggagtgcaccccacacaggaggacgggggcagagtgcttgctccccagaagggcccagcagctttcctgtgacccaccctgtcctcattggggtgccacagaggcctgggttccagccctggctctgccactgagtctctgagtggccttgaacacaccataccctgcgagctatacaatgggtacatgtgtggagagggttagaagagatgacgctgaaggtctgatccagctctaaaatgccacatccagctgacttagcctgttcctctgacctccatgccctccttcctcattcccccacaaagtctagtgccatcacctaccaggtgatcccagaggcctcccagtgggtccccttgacaccctgcacccaggtgccagaatcctctcccctaactctcattttcacctccactctctctcacagaagaacttccattggctccctctttctgtcctgtaagcctgagtgctttagcctgagtattgtcacttgctgttgttgactttctcctttaactcagcgattcagcccctggtgtgctgtgagcgcttatccctgccagccagcgtctgcacaccccgcctcccttgtccacagtgccttctacccgccaccctcagatgtcttttgagtcccctccccaggaggactctaatcagtcctccccttggtattccctggagctgatagctgtagtttgcgcttgtcacgtgcctatctgtgactgcccgcgtcttctgtgtgtgtgagcctgtgtgatgcctccctcgttgggctgggagctcccccagggaaggggtcttgggtcacttgttggattgcgggttccctgatggttagggtgttgaggcgatgggagcacatgtcactggggaacttggcctcggacttggtgcccctcggacacccctcccgcaccctcccctgctgggctacttgggaggagataaggggtggcgggaacctgaaggggccctgcccactggagctgggccacccctggctgctgagggctggactgacgcccacacccactcctctgttccctgcaggaggaagagaatggaggccgtggaggaggtaagggaggactggcgggcgctggacctgcacgggactcctcttccagctcctgtctctccctgtcctcccctaagactgcctgtccttttctgtgcccccctcccttgactcctgttcctgcctttgctcctgtctgtgcccctggtctggccccctctgggcacctcctcctcactctctctgtcctccccctttcttttcgcacatttgtctcccttgggcatttcctccacagaagtttgctgagctcggcacactgtgggcggcactctggggcgcagatgggtgtctgccacctggcccctgccctcaagctgctcccagcctagaacaaggcagggcagggctgcagggcctgggggctggtggtgggagcgctgagcaaaggctgtccttggaggcggagacagtggagtcctggtggaagtcagggatcccccaaggtctttctctcatatgatgtgagcctgactccccttgctgtggctcttgctccccagaggcccctggtggacacccaggcccccaggttattcaaggcagagtgccttctctggcagccttcctgctctgccactggggctttcgctgggcagccataggacactcctgcatccccatccagaggccgtgatgagggaggagcccgctgacctagagcggcccatttctctgttagcttagagttagcagcacttaggagcagagaaactttgttggggtgcaatgcgatttgtgcccaccctaggggcctcggacctctgcttggagtcccttgagcctggggaagggaggaggtgggggatgtgagtattaggtgtcttgctgggtctgcgggagtgggcatccctgtgaggagggcgtctgactctgccacatgtcttcagaactgttatggcctcttgtatggcgccctttcctctgtctcgtgacttgtgtgtgctgcacatgtgtgtgtgagaatctgcctcccccactggacagggagctctggaaggacaagggctgtgcttgttcatcctttttttttcttttgagatggagtcttgctctgtcacccaggctggagtgcagtggtgctatccgggctcactgcaacctccacctcccgggttcaagcaattcttctgcctcagcctcctgagtagctgggattacaggtgcccgccaccgcgcccggctaatttttttattttttagtagagacagggtttcaccatgttggccaggctggtcttgaactcctgacctcatgatctgtctcggcctcccaaagtgctgggattacaggcgtgaaccaccgcacccggccttttttttttttttttttttttttgagacagtgtcttactttgtcacccaggctggagtgcagtggcacaatcccggcttaccacaacctctgcctcccaggttcaagtgtttctcctgcctcagcctcctgagtagctgggattacaggcatgcgtgccaccacacacagctaatttttgtatttttagtagagacagagattcaccatattggccaggctggtctcgaactcctgacctcaagtgatccacccgccttggcctcccaaagtactgggattacaggcgtgagctaccatgcctggcctgttcatcctttttagtgtagtttttagcacatgaagaggacacaggaggtgtttacggagtgactctttgtatgtccccataggttttctttctcccaggtctgtgtcctcctgttgggttctgtgcctccatggacctgtccagtgtcctcgtggatgtttgagcctgtgcatgtttgtgaccggacgagtgcaatcattctctgagtgtgtgtcccctgtgtgtgtagctgtgcatgggtgtgaccttccccagccacccccagctaacctggctgatgcccactaggaccctccccccggtaccgcctggagcccatggacaccatctttgtcaagaatgtgaaggaagacggccctgcccatagggcggggcttcgcacaggtgagctggcccagttacctgggctctactttctaccttctggctaggattttattctcagatccaggtgttggggaggctcctgtccccacagtgttagccatgcctggtacaggggttctcagatggggcctttgatgccctttggtcaccactcatgcgctccttgtccccaggagaccggctggtaaaggtgaatggggaaagcgtcattgggaagacctactctcaggtcatagctctgatccagaataggtgagtgtccctgacccctcgtcccatattatctcccctcccctttgccctggggatgccctggagaccaggatcccttcctcctggaccctgttccttgacccagcctgacgttctgcctgtctctgtagtgatgacactctggagctgtctatcatgcccaaggacgaggacatcctccagctggtgagtccagcccctgtggcctgagaggagacccctgagccctggggcagcaccggctcccctgggaggcagagaaggaagtgtttggagggcacaggccgacattgcccagttggggatgccaggcccctccctgggctggggctggttgttgcttcattcggagctgctctgtgctgggggagcgggagacctggccttggcaggcaggattcctgccagggtatctggaaggagggtggcccagcaggctctgccagcctggcacgttcttgtcagctcctaggagagatgcctcttccctgcaccccctccctgtctggccctgagtgagggtgtctctggtgggtgtgtccacacaggcaccgagcacacatcgaacactgctcagcacactgcaccccacccaccgtcatgtgcaccacacagtacccgagcagtacacagccacacagcacagccccacagtcccaccctctgtatagcacgaagcacaccacaacacacatgcagcaccaggcacgtgccgcaatacagacaaccacacaagcacccactgccacagttcaccctcatacagcgaagtgcaccacaacacacacccacaaacattaaaacacgacacactcaccagccccttggctccctgcagtacaaacagcatagtaccttgcacactcggacctccacaactacacacccacgccgcactatcacaacatgtatgctcgcaaacaccgcggcatcctcctgcccatctcagcacgtgcgcccacccgtgtcacaggactccaaatttatacattcgacacctcagcatacctagaagacagcatccagcctgccacacagagagcgtggcccagacactgcacgaagcaggccctgcactcccaagcatacccttccacacacacacacacacactcacactcacacactgcctctttgtgcctggagccccggcggtccgctttgcccagtgcccacctccctggtctcatgggtcccagccagatggcggcttacttgcccctgaggtcactgtccctggggaggccctgggagccgctgtgctggcttctgccttggacgcactctcctaatcactgtaatcacagtgccatgcctggcatgatgcccttctggaaacctccacccctgacctcgattgtccccttgctcttcctggggagagggaggaaggagggggggatctgaggtggactgcttaccccaagtctcaaggccctgcctgtacagctcccccaggctgaggcgaggccagctatggggcagtgacagggtgggaccctagggtgtcccccactctctccagttggcaggggcaaggagtgggaagggcagtagcctcaagttctgctgcccaggctggggtgggctggcagcgccagatgacagcatctgggggcctccactggcccccgcatctctgccagccggagggtggggcccaggcattcctgtggttggaagccaaggctggaggccaatcgggcctcggcagctgctgacgccaccaccgacgcggcgaggcccctccacacccatcctctcctccctcctcctcccgccagccagccgagagagagtcgggtgggggtgagggggagccgcagggagggcagacggagggggaccggaggccctggccagggcaacacagtggtcagtggcggggttagccggagctgggggtgggcggaggcgggctgggatgctgccgccgccgtgatgatgccgggagcctggggagacggcgggatggcaggagggagaggtatgtgtgtgccggccctgtgccagctggagggggctgagtgtgcgggggtgtggtttagcttgtcctcatcacatgatgtttgtgcctgggactggaggtgtagttatttgtgtgtgtttcattgtgttctactgtgtgtgtgtgtgtctctgggtgtgtatcttccagtgtctccttgtagtgtggtgtgtgtgtgtgtttggtttcaccctcccaccctttggttctttgccttgagttaggctcctgggcagctcagcaggggccaggctgggcccaggccacaaggccgctgtccctgggagctgactccttttttggctgggcctgggcgctggccctgtcactccttagcaatgcagcgtcagcctcagctcccagtgccaaattccaggcccaggggtggcagaaggtggctcaagtcccctccttcaagcctggcaggaggtgggcaaactccttctcacccctgtggctcaggagccagctccccattcccggggatggagggacagctgggctctgccagcctctgccccacccagacacacccctagccggctttcttctctcatctgccaccttgactggtctcggtggggttttccggctccacccgaggagctttgggcattggtggacataagggggcaggcaggcggtggaggccaggactgggggaggaccccaggaaacagatgctggaatgtttgtggctagggcagtccttgtcacagtcttagcgaaatcccacttttgctggagtttgcctgcgtctcaaaggcttcttgcttcttctttgttctctccctggacctgcccttccacccccacccacttatgcctctccctcgttccccccaccgcttggtcctctcccttcatttccctcctgggctccttgacctcctcgggctgccgttcccctaccctgtgggacttgtctggccctgcttacctgtctctgtgtctctggccaggcctactcccaggatgcctacctgaaagggaacgagccgtattctggagaggcccgcagcatcccagagccacccccgatctgctacccccgcaagacctacgcccctcctgcccgggcctccaccagggccactatggtgcctgagcccacctcagcactgcccagtgacccccggagtcctgctgcctggagtgacccggggctccgtgtgccacctgctgcccgtgcccacctggacaactcttccttggggatgagccagccccgccccagccctggtgccttcccccacctctcctcggagccccggacgccccgtgccttcccagagcctggcagccgggtgccccccagcagactggagtgccagcaggccttgtcacactggctgtcaaaccaggtaccccgccgggcgggggagagacggtgcccagccatggccccccgggcccgcagcgcctcccaggaccggttggaggaggtggctgccccccgcccgtggccctgctccacctcccaggatgctttgagccagctgggccaggagggctggcaccgagctcgctcagatgactacttgagccgggccacccgttctgccgaggcactggggccaggggcactggtgtcaccccgctttgagcggtgtggctgggcttcccagcgttcgtctgcccgcacccccgcctgcccaactcgggacctgccagggccccaggccccacccccgtctggcctgcagggcctggatgacctcgggtacatcggctaccggagctacagcccatcattccagcgccggaccggcctcctccatgcgctctccttccgggactcaccctttggggggctgcctaccttcaacctggcccagtcccctgcgtcattcccaccagaggcctccgagccacccagggttgtacggccggaacccagcacccgggccctggagcctcctgcggaggatcgcggcgatgaggtggtcctgaggcagaagcccccgacgggccgcaaggttcagctgacccccgcaagacagatgaaccttggatttggtgacgagtccccagagccagaggccagtgggcgaggggaacgcctgggcaggaaggtggcccctttggccaccaccgaagactctctggcttccatcccctttattggtgagtgatggtacatgtggctgtcctgggggacttagctgtcggctgtctgtgtcctgctgtaccccatctgcctgtctgccatgggcagaattcggctgggtgctggtgggatcatcttgtttctctgtcaattcattcatctgttcatccatccatccatctgttcttccatctttctttctgttctctgtcatcctttcttccatcctacctctcattcatttatcctttcagcatctttccacgcactctttcttttttccctctccccatccatccatccatccatcatctgttcttccttccttctttccttcctctctccctcctttgttcattcatttgttccatccattcatccatctatccatccatctattcttccttctttccttcctctctccctccttcttttgttcattcatttgttccatcctttcttccacccattcatccatctttctttcctttgactcttccttccattctcccattcttccttccatcttccctttgtatctttccctctttgtcctttccatccaccctccatccctccatcgactcaacagatatttgtgtcaggccctgtgcatggctccatgctctcctggactggatggcccagcagagggtgttggacatgcagggacaatccattgggatgggcgtgtcgtgggacagggagcttgaggagacgggctcagagaagggctatggtgagaatcttggagaaagaacatttgggctaagacttgaaggatgagaaggagtttatcaggggaagaatattcaaggagagggaatagaatatgcaaagaccctgaagggagagaggcaggacccccttccaggttgtgaggaccctttcaggcccaagggtctcattagtcactggggttggcttttgagagcagagggaaccctctaaggcttgccttgccttcgactggatgcaggagagggagaggcaagagagtagagtggctgggtgatgcccaggtttctggccgggcttgggggtggtgcctcacccccgtgttgggagtgagagggggacaaagttcaggactgttgaatatgaggtgtccaagagggagcaggatagacggggctggggagaaagagcaagatgcagggtaatggagagggatggtggtagatgggagatgagctcaccctaccagacagtgagagggaggaggcctggggcagggggaagacacagccctggctcccccagccagccttcggtggagcagagacacagccccttctgctagtaaggaaggctctaggctgtggccgggagaggcagtctcttcttccacagcacagtctgtttgagggggagatgtcatctctgcccttgaggagccccagctgatgggggagcttttgcccttaggaagctctcagtctgatggggaagacactgcccctgccctcaggaggctcttggtctgagaggggagacataattcattctctctgagtgccctcagtctgatgagggagacaccgtccctgccctcagcaggctcccagtctgatgggggaatattggctctgtcctctggagcccggtctaaggagggtggctcagccccactcctgagggtaaggattccatggccacagtctggacagtgggccagtcatgcttgacagtgggcatgttgccagcaggaccctttgggatgtgtctgagcctggaggcgagtggcacgggggctggcaaggctagggtggaggcaggcaggctccgctgtctgctgccttcacacctttctccttccacatgcatagatgagcccaccagccccagcattgacctccaagccaagcacgtccctgcctctgctgtggtctccagtgccatgaactcagcccctgtcctgggcaccagcccatcttccccgaccttcactttcaccctcggacgccattactcgcaggactgcagtgagcactccccacacccccagccccaccctctccctcgctgcccagtcccaggggtctctgttgggcctgctgcttgatgtctggcctcttcctctggtttccgcttctcctgcggccccttgggagagtcacctcctgcccctgcccagaagggagggctctgggaagcccctgacctgctgccccgctgaccctgaggcccgatgtgggcggctttgcaggcagcatcaaggctggccgccgctcctcctacctgctggccatcaccacggagcgctccaagtcctgcgatgatggactcaacaccttccgcgacgagggccgggttctgcggtgaggccctgtccggacacggggtggggtggccacagccaccgtggccagctgctctggggcagggctcttggccctgggggtcctctatgcatgggacagtgtgcctcccccgctggaaggcttctgggcttggggtttggtgggtgacgagatagtgaggtcccagctttgctgcccacatccctcaccctcgaccctcgctttccaggcgcctgccaaaccgcatacccagcctgcggatgctccggagcttcttcaccgacggggtgagagctgcaagtgtgtgtgcgtgcgcaggagcgagggtgtggggagagagggtgtcagggaggtggggccacagcctcggcatgggggttcctgctccagctcctgccttcctcctcctccctgcacccctcaccctcgtgtccaccgcgggacccgccctctgctgtgggccccgacatccctgaatgacaccatgcagccccgcccatgggccctcgtctggactgcctctttccagacccatcccccatagccacatgactcacttctcccctgtcttcgcggctttttaggtcttccctgaaattccagcctccgctcctgacatttcacgcctcccttcgctactctatgttttcctcctcagcacgcctcatgcacaattggtgtttcccttcctccctgcctggctccccagctagaatagaagctccctgaacttatatttggggcttcatttgtttccttcactaccctcagtcagtatttgcatcgcgtcttgtcttcatgggatggggtcggggtggacactggaaaggtgtggccgggacacagggttgagactggtggacaggtagagttcccagcctcaggacctggggaggcaggatcaggcctgtgatagccctggctgtttgtttgttttgagacagagtctcactccattgcccagtctggagtgcagtggcatgatcttggctcactgcaacctccacctcctgggttcaagctattctcctgcctcagcctcccgagcagctgggattacaggcgtgtgccaccacgcctgggtaatttttgtatttttaatagagactgggtttcaccatgttggccagactggtctcgaactcctgacgtcaggtgatccacccacctcggcctcccaaagtgttgggattacaggcgtgagccaccgcacctggcctcaaatgattttcttgcttcggtctcccaaaatgctgggattacaggcataagccatcgcacctggacatatttttgtttttaaaatcatacatatatttttcatgcatgatttttctttctttttttttttttgagatggagtctcactctattgcccaggctggagtgcagtggcacgatctcagctcactgcaacctccacctcctgggttcaaccgattctcgtgcctcagcctcctgagtagctgggattacaggcatgcgccaccacacctggctaatttttgtgtttttagtagagatggggtttcaccatgttggccaggctgatcttgaactcctgacctcaagtgatccacctgtctcagcttcccaaagtgctgggattacaggcatgagccagcgtgcccgccccacctttccctggctgtttttgattatagatggactggaaaagccatcttgatgtcaagcgctctgtctcattggttggttgaacaccctggtgatattggcacctagcttatttcttatcactttttctgcttacttaactctcccttgacttgcgccctctggctggagtcctgttgagactgtcacttcctctgtttaactcctcgtggacatgactacctgctccactcactcagcctttgttgatgttcccacttcccctgtttatttaactcctcgttgacacgatcacttcctccatttccttgattcttctaagtctataaagttatgggaggctccgaattggctcctgtagtgtggtgaggcgtgtggtctgctgacaggtcgtagcctttcctcctttctggcttctcctttatgtacgtctcatgacctcaacacaagtggtccagagaggacaagcaatgcccatgaggtcgcacagcacatcggggtgtagcacagacatatatcaggcctgtgcggccacaagtggtccatggggttcctgagatgctggcattgtgggagccaccctaaattgtcctctgttgtctccctgcagtccttggatagctggggcacctctgaagatgctgacgctccttctaagcgacactcaacctctgacctctcagatgcgaccttcagcgatatcaggagagaaggctggttgtattataagcagattctcaccaagaaggggaaggtaagatgggtggaggaatgaggtggaagctggctccagcagaaccctccagcctctcctaggcctaccctgacagcctctggagccagagagaaccagtgtaggttgttgcatgaaggatggaggttagatgctaggaagaacttcctggcagggggatttaaagaacttatgtaaaagaagttaacaagagaggtggattttgctgtgggatggatctgatcgagtcgtgcttggaatattctggcaaaaccatcccacacgggccctggcttgacaggccatcctgaagatggccgctggggctcatggaaaacaaggagcaaggccggggtgatttccgtaggagagctaaggcccaagaagacgcaggcaagccagcaaagggcttagtgttcatcctaagggcaaccaaaagctctcgggggctcttgccaagggagttacagctttaaaatattcatttggctccctgggagtgagttagggaggggccatgctggaggcaagaagaccaattaggagccaccgtggagatccagatgagaggcgaagggggcttcggggagtagttggggagggcctgggagggaaccagcaggactctgagaggagaagggcagggcccctggatccatggggtgcaaatcctggccccaggctgcgctgtgggctggagaagtgggaggagagaccactgccttccctcctggcgattaggatgaacccgggtttgactcttgactgcatcacccattgctctgagagcctgggtgactcacctggccatgactcagtgtcctctcctgtaaatggagctaacagtaatccctagctcataagcctattgctaaggattaaatgagatgatctaagtaaagggtttacccagtgcccggcacttgaagctgctgtacttctgcttactgctatttgttttctttttttgagacggagtctcgctctgttgcccaggctggagtgcagtggcgcgatctcggctcactacaacctccacctcctgggttcaagcaattctccagcctcagcctcctgggtagctgggactacaggcactcaccaccaaacccggctaattttttttttttttttttttgtatttttttagtagagacggagtttcaccatgttggtcaggctggtctcgaactcctgacctcaaattatgtgtctgcctcggcctcccaaagtgctgggattacaggcgtgagccaccgtgcccagcccgcttactgctatttgaattttctaccctgccttctggggtcttgggggtccctggaaagaacataagctttgaagcagacagactttgagttcctatccggccacatatcaagcacgtggctttgggcaccccacttaccttccctgagcctcactttctgatctgtacgatgggaacaatgttatcctaccccaagggctgctgtggattaagtgagggtgaagtcgaggcgggactggcgctcctctgtggagaatgactaaggccgccctgctcgggagcctccgtggaggttctggggagttagtggtaagggagccagggcagccctgccctcctggggctcctgtcgctcctgttgagcagagagaacgcatgtggcgtcatggttcccagtgcacagactgccgtgatgccggggtgcgggggcgggtgggcgtgggtagggaggtatccagaggctgagacacgaaagggtgagaagccacaaaactgggagacagtggaggggcctgacagggaagatgtctccttagagggtcctggggagaggggtgctgggagccagggcgagaggtggaagatgagctggggaattgggtgcctgcccagagtgtggggccttgatacccaggaagagcctgtccagggttttattattttattttattttatctatttttgagacggagtttcactctgttgcccaggctggagtacagtggtacgatctcagctcactgcaacctccgccccccaggttcaagcaattcttgagcctcagcctcctgagtagctaggactacaggcgcctgctaccacacccagctaatttttgtagttttagtagagactgggtttcactatgttggccaggctggtcttgaactcctgacctcaagtgagctgcctgccttggcctcccaaagtgcttggattacaggcgtgagccaccgtgcccagctctgtccagggttttaaatgtgggctggggatggcaggagactggggttatgtctgtgacaggaggagccaatcccattgcccttgtccaggtgagtgaggctgggggccctgacccaaggcagtggtgtgaggccgggtggagcagacactttagagagagattccaggggaaggagggccagggcttgccggctgctgggaggtatggaaggaggaggaggcgataaggttcctggattcctggcttgggctgagggagggtggtgggtggtgggaccctccctgggccatggcatactggaggaacaggtttggggagaggaagccaagtggctccactggggctatgtgagtctgagggccctgggacagaccccagtggaggtgtcctggggacagaggctctgagggcgtggcactagagggaggcccacctggggatggcctttgtctgtcagcaccgacgagttacctgtgcctctgtgcaggggcttgaaggaagaaggcaagagacccggctgagccttgagagaagtgggggggccggggaggctgacagagaccaaaaagagccagcaagttggcagtgacccatggggtgggagccatgaggcaaggagggaccagccatgtgcactgtgcgaggagagccacgtgtgggccagcccttccagtctaacgtgtgagccacatgaagggtccttgtgagggtggctggctccccctgccggggagcctgaccctcagctcctgggggccctgagcccagttcagggacaggagctgtccccttcctgctcactggccagttctggaggaccaggcctccactcccttgctggccaaaacccgatatcacttgttctcttggtgccgtggcctggacgttagaggagagtcttcaagtcagcctcaggcccttggtccacccaggccgtgggcaccctctctgtgctccctcccagccccagcctctttcagagacacggactgtcaggcagaggagggaaagggacagtgacttgtccccgcagcctcagccccagcatgggagctgcatgcagccttggtgaccaactctctcactcatttaccagccggagacactgaggcctgggagtgcggttgacttgtcctaggttatgcctctggtttagcctcagagaggtgcccttgtcaccacctcactgtcacattaaaattctccctggagggctctgctgtctcctgctctgaatgtccctgtccccatccagcagttctgtgatgagcagggctcacagctcaggatccacacgatgggaggccagatgtgggctgtgcccatctgccagccacggggtctctttgtctggtttgttcggagagctgaggcctgtgctggatgtggagccaccagccagcagagaggagctcttggtctgatgggagatggagctcctgccctcagggtgctccaaggatcattaattcatttattcaacaaatattgatgagcccttgcatgctgctgctgtaggccctgggatatggaaatgagaggacggacaagctccctgtccccaggacagcctgaggctgcagtaagttcttggaaaggatcaagctgatcagaagcgggagctgcattgagggaaaaatatggccagagaaggcctcactgaggaggtgacgttggtgatgctggagctcagatctgaaggggaagaaggaagcagccacatatagaagtgagggagggggcttaggcaaaaggaacagcaagcggagaggccctgagaaaggaaaggcttggctcgctcacctgcaagggccccctggcttgacatagtgagaaaggtgtgaagatgaatttggagaaaggcagggacagaccacaggagaccttagatttgattctgagggcgatgggatcccttgagaggatgctgagcaggggagagatgtgatctccttttcattctaacatgatcgctgcagctgctgctggagaatggttgcaggagcgagagtagagactgggaaggtctgtgcatcctctaagcaagaggcgttgatggcgtggaccgggtggtggcaggaaagacagagacgggatgttttggaggcagaatagttgtgacttcctgatggatgggatgtcaagggcgaggaaaagggaggagtcaagggcagctcccaggtttctgggcaactggatggattgactgggctggaaaagatgggggtggagagtggagaaggggtttgatggtaagaaatcacatggcctggcaagtattgtgcaaagtgcccatgggacctgcaaatgaagccactgagcagggtgggggtgccgggctgtggctgggagagacgctgggcttgggaatggccatcagcagatggacctagtttaaaggcacggcagaggtgacatccttgagggaggtgtgcagggagaggagaggagaggagagtcaggacaaagttctggagctccgcctcctttagggcggggtctcttaccctcagctctgctgacattttgggccagataattccttgttgggggaggctgtcctgtgcattgtgcaatgtttagccgcatccctcagatgccatagcacaccctccagctccctccacacaaatgtcccgtggggactagtctcctggctgtttaactacaggtgtagagggtgggggagggcaagtagagaagactaggaaggagccagtggcattaggaagaaagctgggaacgtggggtctcaggtgccgagatagggtctggagagggaaggaggggctggctgtgtcagatgccgctgaggggttaaggcaagttggggagaagcagccactggctttggccacatggcggttctgggtgtccctgagaaggagcttctgggcaagtggagtcttgggtgggcggcaggaaagtggggagaacaaccctctaagagtgcggacggcttctgagcaggtttgctgggatgaggggcagcctggggaggggcgtgggctgggaatggcatccccaggatttcatgtatggagggccatgctgggtgtctgagcattgccaccgctcggtgagtgttgatgctggtgtttagagggggagagggttggggtctgctggggggctttaggatgatgggtaggggtgtctaggcaggcaaggggctgagaaggcattggtgggctgtgggcaggaggctgcccaggtctagccgggtggagcagggggctcctggtaggcagcgtggggtccatcccctggctgtcctctgtctgctactctgagagcagtgggcaaaactggcctctcaccattcctgtctcccccaaccccgtgtctccctgcagaaagcgggcagcggcctgcgccagtggaagcgggtgtacgccgcgctgcgggcgcgctcgctctcgctgagcaaggagcggcgggagcccgggccggcggcggcgggggctgcggcggccggcgcaggtgaggacgaggcggcgcccgtctgcatcggctcctgcctcgtggacatctcctacagcgagaccaagaggaggcacgtgttccggctgaccaccgctgacttctgtgaatatctctttcaggctgaggaccgggatgacatgctgggctggatcagagcgatccgggagaacagcagggccgagggcgaggtgagggcccggccagcccggcagccacagagggcgggcggggtggcctctcaccggctgtggacctgggatgcccgctctgagcctcacttccctctgctagaaaggggggctgacaggagtgcacctcgtgattgtgtcccccaaggtttcggggtgaggagggtgcacaggcagggctcacgggggacctggcgtcctcaggtgcggggaccggcagtcaccatcctgaccctaatgatgacagggatgattgtgactgtgttaggatcgccttgagcaggctccggtgtggagtggtcagctccaggccagtctcagcttttctcagcaggcgaggaaggcaggggcctcctatggagtgtgttagggcatgagtgtccccgcaccagaactgcactgggctggcctgtctgcagaaggatgagcacattgaccttgtgaggaggccgagaggcttggcctttggccacaggtgggcaggggtggagccaagggcctcggcagggattttgggataatttttttttttttttgaggcagagtctcgctctgttgcccaggctggagtgcagtggcgcgatctcagctcactgcaacctccgcctcccaggttcaagtgattctcctgccttagcctcccgagtagctgggactataggcgcatgccaccatgcccggctaatttttttttagtagagatggggtttcactgtgttagccaggatggtcttgatctcctgacctcgtgatcctcccgcctcagcctcccaaagtgctgggattacaggtgtgagctactgtgcccagccgaagaattttttttaatggtgcccattgtggtcagccatagctacactccaggggcctaggtagggattcctccctgtttacttctttggccaggaacctacacagaagtgccttgagacacccacacaaagtcatgtgggcgtcccaggcctggggtctctgccaagagggcagtgggcctgggcctgctgtggccgtgggagggggtgctagtgcatggcctcttgctgaggtcacatcctcttactgaccaggctctgctctcccgggaacagctttccccactgcagggaggaaggcacctggaatttgggcctcctcctctgggggcctctcttggctgtccccaacaaggcttagtcaggggatcccaagtcaccatcactatggcagtagcagtccctcctggggcacctcctccatgcctgctcagtgtctgccaggacggtggcgagtgctgcatgattctgcacccggccctgagccttccctgttagccccccatgtttattaccgaggagactgaggctcagagaggctaagaggcttccccaaggcctcagctggtgagagggtgctggggagtccaggcctggtctttctcactccagggtctgggctgtccacctggcaggtggacaagaggggaagcagggctagggatgagccctggggtgggctggctgtgggcactgacatgatccgctctctcctctcctgcttcaggaccccggctgtgccaaccaagctctgatcagcaagaagcttaacgattatcgcaaagtgaggtgaggcccagccctcgtggagcagtctcctctgtgggggtggtagggggctgaaggcaaaggatgtcttcctggcccacctccagggctgccctctgctgggggaaggggtatccagggtctccaggctgcagttaggcatggaggcattgcctcagggtggaggggaggtcccgaggggcgggaggccagggtgggtggcctgcttggccaccccaaatgaagacctctcctctccccctttttcctacacagccatagctctgggcccaaagctgattcctcccccaaaggctctcgcggcctggggggcctcaagtctgagttcctcaagcagagtgcggcacgtggcctcaggactcaggacctgcccgcagggagcaagggtaggaaggtggccactgagacagggtggtgtgtgggggcagggggcatggggaggggagggcacgcgtgtgtgtgttgggctgtgtctgctcatgtgtgcctgactgtgtgccagggctaccggtatgtctgtctgcgtgtgcatgcctgtgagggtctaggggctctcagggtctcggggtggaagggcctggagcctgattcccgtccctgacatccctgctgggtggtcctctaatctttgctggtgtctctgcagggatgagaggcccaccctttccaagagcaacctttcccatttcactcacctttggctgttagaaagttcttacctggctgggcaaggtggctcacacgtgtaatcccagcactttgggaggccaaggcagggcagatcacctgaggtcaggagttcaagaccagcctgaccaacatggtgaaaccccaactctactaaaaatacaaaaggccgggcgcgatggctcacgcctgtaatcccagcactttgggaggccgaggtgggcggatcacgaggtcaggagatcgagaccatcctggctaacacggtgaaaccccgtctctactaaaaaatacaaaaaattagccgggtgtggtggcaggcacctgtagtcccagctactcaggaggctgaggcaggagaatggcatgaacctgggaggcggagcttgcattgagccaagatcgcgccactgcactctagcctgggtgacagagcgagactccatctcaaaaaaaaaaatacaataaaagtacccgggcgtggtggtgtgcgcctgtaatcccaactacttgggaggctgagacacgagaatcacttgagcctgggaggtggaggttgcagtgagccgagatcacaccactgcactccagcctgggtgacagagtgagaccctgtctcaaaaaaaaaaaaaaaaaaaaagaaagaaagttgttcccttgggccagcagacatggtggctgacacctataatcccagcatcattttgggaggctgaggctggaggattgcttgaggccaggagtttgagaccagcctgggtaacatagaaaggtcctatccctacaaaatattttttttatatattatttatttatttagagacagagtctcattctgtcactcaggctggagtgatctcagctcattgcaacctccacctcttaggttcaagcgattcttgtgcctcagccccgctagtaactgggattacaggcatgtgccaccacgcccggctaattttttttttttatttttttttgagacggagtctcgctctgttgcccaggctggagtgcagtggtgtgatgtcggctcactgcaagctccgcctcctgggttcacgccattctcctgcctcagcctcccgagtagctgggactacaggcgcccaccaccacgcctggctaatttttttgtatttttagcagagacagggtttcaccgtgttagccaggatggtctcgatctcctgacctcgtgatccgcccgcctcggcctcccatagtgctgggattacaggcgtaagccaccgcgcccggcccacgcccggctaatttttgtatgtttagtagagacagggttttgccatgttggccagctggtctcgaactcctggcctcatgtggtcctgccggcctcagcttcccaaagtgctgggattacaagcataagccactgtgcttggcaaaaaaaattttttttaattagccaggtgtggtggtatgagcttatagtcccagccactcgggaggctggggagggaagattgcttgagcccaggaatttgaggctgcattgagctatgatcataccactgcactacagcctgagcgacagagactctatctctaaagaaacaaagttctatggcttccgccttgtagttttggcccacgagccacacggaagtccttgcattgctctgggcctctcctttggggtaagcatcctccccttcaggccttctctcttgccatacaatgtcccatcagccctgggcatctggtttcttctctgatggaatccccatacgtccaaatgtgtgaatgtggcagtgaatgtgtgtgaccctcctggataccccagctcactctggctctgtctcccccacttcagatgacagtgctgcagcccccaaaaccccctggggcatcaacatcatcaagaaaaataagaaggccgctccgagggcgtttggggtcaggctggaggagtgccagccagccacggagaaccaggtgagtctctgccacacgccagagcaggcccagcagggggagaccgaggcacagagggtcagagcagcaagggacatggaaccagctctccacctcattgtacaaacacagctgggaaaacagcccagagaggggaaggcccccgcctgccccgggcctcccagggagggagcagcagggctgaggctgagcccggctccttctcagaccatggcgaggctttggtgtcatttttagctcccagactggaggcagcaagggccttttgttccccccaagggttcctggcagcagctctgggccttgcattgtccccttcttggcctccccagctcctctggcccctgtcccccctaacacccctcccatgtgtccccagcgcgtccccttaatcgtggctgcatgctgtcgcattgtggaggcacgagggctggagtccacaggcatttaccgagtgcccggcaacaatgcagtggtgtccagcctacaggagcagctcaaccgcgggcctggtgacatcaacctgcaggatgaggtgggtgaagctggggggtctgtggaagaggggctgagatggtgtgtgggtggtgctccgcttggagagttctgtggtctattgtgttgcatgcattgtgccctatgacatgcccggcattggtccagaacaccaagatgggcaagatgggacctgcccccgctggccagcccggggatgggcatcaccccaggctgaagctgaccaagtaaatgcagtcatggcctggggagctctgaggcagaggctcacagatggcagttttgtccgagtgtttaggatgagtagagttcaccaaaggccggtgaaagccaggtgagggcattccaggcagcagaatggcctgctcaatggtgtagacgcggaaagtgtgccaggagtcaaccagctttctctgtagaaggcagagggtaaatattttctgctgtagtttgctctgttgcgttccccccttctcttcctcctccttctcttcctaatcctttaacaacgtaaaaaccatacttagctcaagggccatccaaaagcaggctgtggctagatattgcctacagaccatggtttacaaaccgccggcttagaaaaaggggaatatatgatgttttctagaatggccagcaatttgggtggctgcaacatggaaagagaagtggctgatcaggcgagatgagaccagcctgtgaagggatctgcaatcacacttaagtgtttccagcaaggccggcgattctcaaagggtgttccccagagtcctagggttccccagaggggccttgggaggccaggggcaggtcaggaccccctgtccttgctagagcaaccctgctttgccctgtctgttgtactgggttttcatgtacaattttatttgcccaaaggggctctgataaaaaagatattttggaaaaccgtgaacgtgggcagtgatgtcccacgaatcacacacgtgaaggctcatggaatacacaagtcttcctgtccttggagaatgaggagctgagacaagtgtgtgtgaaattgtggacaagagaaaaagatgatctctcatcagggaccacactgtgatgaggaaggagagggtgctcaggctggagcaggtggtggctggagggtttgagtattggaggaatgaataggagggggcaggtggacgggaagcctttcggggtgtgagacgatggcattttccaaaaccccagcaagggccggggagggcttgagggttaggacagagagtggatctacctcctgggcttggaggtggggagggtgaggccccagggggacagagaaggcatttgatggcttcactgaagacttcgaccttgatctgatggacagtagggagcttctgatggttcttaagctggggaggcatcgtgagaacaaagttcaagaaacagtaatgctcctgctcatgtccattggatacgaatgcggagggcaggggtctggggagaagtcactgatctatggaagcgctaagtgtcgggaggacttggtggtctcaggggaagggggaggatgggagcaaccctaagagttgtctgcatgagagggaggaaggaggggcgaggaagagccgcatgtttgagctggggctggtggtatcttcccttggcagaaaccagggagtggggcagcgtgaggagaggcggaagggaggggccgtctcagggagtggctccattggatttggggtgtggaaagtcccttgcatggggtgagggcataaacaggcgctatattgagcctggactagagagtggcatgggtcctgctgcagctgaggcatgggatgaccaagggtgggccgcagaacagcaggggccacgctctgagtgggacagaaggagagggccgccagtgaggctggggtgagggcagacacttcactctggaggaaccaggaagcactggccagggcattgggtttggcagctgggagatgagaggagctcacacctgagggccaggaggtaacggagtcgggtgggcaggagccgcactgggtgtgtgtgagatgagggggccatgctggcaggcagctggtccaagccagggccagctgggggcatacgaggtatattgggtgtgttgttttgtcttggatatcattgtgtcatttgttgtgggtcgtgctgggagtaagtgtagtgggggatgaatctaacccctggtgagcctgtggggagtgtattgtttatgggattgtctggcattaagctgtggatccattgtaatgagtgtgtgtactgctgtactgtgtctctttgttgggggtattaggtcgctttctgggcctgagttattctgagccattcccagcgaggcggctgtgcccaacttggttgcaatgtggggtgatggtgccccctggaggacagaagggacaacgacccggccgttagttcttgtactcgacaaccatttattttagagtagggtttctcaatctcagtggacattttgggaagaacaattatttgttgtgtggggttgtcctgtgcactggagggaatttgacatcatccctggcctcgatccactagatgcaagtggcacctcccagttgggaaaatcaaaatggctccagacattgtcaaatgtcctctgtgggtggagtgggagtttgggggacaaaattgcctccttctgttagaactactgatttagggccatgtaagtaccaggttaactgtccttgctaggtgataggagcacagtgggaaatgagacagacgggatcctgtctcctcctggagcttacagtcctgcagggagacaggcatgaacacggaaacaaaagcagaaaataatgacaaattgggttaagcgccaggaaggaaacaaagtcagggctggggtgcaggtgacagggcagtggtgaaggtggctgctttagctatgagggtcagagaaggcctctttgaagagcgacttttaggcggggatgaggagccagttgtgtggaggcggggaggaaagttctggttgaggaaaccagcacatgcagaggacctgagacaggaaggagccggcacgaatgactgctgtgtcacggatgcttaaactgtgcccagtggaggcagcagctgccactcactgtctccccacagtgcctgggactttctgtgcatggggaggtgttggagcccacgcactggcaggagcagggaggggctggggccaagtgtgagtgtgggcacaggacctctctggggactcagttctgctgccaccatcctgatgagtagagagcttggtctaagtaggtcccagggagggcctggtgggcttgattgggctctggggtgaatgatcgtggaggcatgggcatcgggctgggcctgcctgtgcctgacatctgacccctcccccagcgctggcaagacctcaatgtgatcagcagcctgctcaagtccttcttccgaaagctgcccgagcctcttttcactgatggtgagtaggaggtggaagtggggcggggaggggacaccagtccgtgcctcaccctgaccactacttttgcatttggtttgttggttttactctttttttttttttttgagacagtcttgctctgttgcccaggctggagtgcagtggcgcaatcacggctcattgcagcctcaagctactgggctcaagcgatcctcccacctcagcctcctgagtagctgagacagcaggtgaacaccaccacacccagctaatttaaaagttttttttcagagatggggggagtttctcactatgttgctcagactggtgttgcactcctgggctcaatcaatcctcctgcctgccccagcctcacaaaatgctgggattacaggcatgagccaccacgctggcttttttttttttttttttttaacacaaaagcttatttaaaaaacatagattgtacagatgtgaatgaagaaaacagcacaggaccctgtgaatgtcctgctccctttcacgggaggttgtggctaacactttctgagcattagagtgtgccaagcacaactccctacagcaactccatgaggaaggtgctattgtcttccctctacagattaggaaaccaaggctcagagaagtttaatgccttgcccaaggtcgcacaggttgtaaatggcagagccaggattccaccccaggcgtcgggcaccgacgggctttggccgtttgctgaactgcttattcacaatctgttgtgtttctctcctggccctcttatatgcatggcagagatacacacgtgcctgcgtggggtttggatttgggtgggttcaggggtgtgctggcagatgtttaacatctgtctctgggggaaaaaagccctaatgcctagcgttttccagcttccatggcgtaaatactcctaccatggtttatttcaagccaccaacatgatgtcaccaacatggaattgggaagagaggcacacagtcgctctcaggagctggtgtgagcgggctccagcacaccgctggttgagttgtttttaacaaaagcagagttgtaattctgagattcattcgtgtcagtgcagagagctctacctcattcttcttttaaatcagccacatagaatttcatggtttgaatagactacaatttctttaagtactcctctattgatggatatttaggttgtcttcaaatgtttgctattacacaacctgttgcaatggctttccttgaataagtccttgcacgcctggatctgtgctctctaaggagattcttagatgtagaattgctgggtcaaagtcccggtgaacctttctgagaccagtgtcaattgcactctgagaaagaggccctggtttagactcccactaaaatgtaggagtctgtctctccacatccccaacagcattggatattataactattattgttacttgaaggccaggcatggtggcttatgcctgtgatcccagcactttggaaggctgaggcgggtggatcacctgaggtcaggagttcaagaccagcctgactgtggtgaaaccccgtctctactaaaaatacaaaaattagctggatgtggtggcgggtgcctgtagtcccagctgctagggaggccgagacaggagaattgcttgatcccaggaggcagaggttgcagtgagccaagatcgcaccactgcacttcagcctgggtgacagagcaagactccatctcaaaataaataaataaataaataatacaataaaataaaaataaaaatactattatttgacacagaatcttgctctgttgcccagactggaatgcagtggcgcaatcatggctcactgcagcctcaacctcctgggctcaagtgatcctcccatctcagcctcctgagtagttgggactacaggtttgtgccaccacacccagctaattaaaaaaaaattttttttggtagaggcagggtctcactacattgctcagactggtcttcaactcctggtctaaagtgatcatcgcgcctcggcctttcaaagtgctgggattttaggcttgagccacctcacccagacagcattaaatattattaacattttaaacttttgctaatcagataagggaaatggtatctcattattgtttttattttcattgccctcattactagggagattaaatcttttttcattagcatattggctgtttctattttctctgtaattgctcgatcagaccatgtgcccatttttctgttgcgttgtttatctttttcttatgttgatttgcgggagaaaagctctttgtgttttacagctattaaccctttgttagtttttgcaaatatttgctttggcctgccatttgcctttcactttgcagtatagaaactgaaaacaaattttttgttgttgttgttttgttttgttttttgagacagagtttcactcttgtcgcccaagctggagtgcaatggtgtgatcttggctcactgcaacctctgcctcctgggttcaagcgattctcctgcctcagtctcccgaacagctgggattacaggtgcccaccatcatgcccagctaatttttgtatttttggtagagacggggtttcaccacgttggccaggctggtcttgaactcctgacctcaggtgattcaccctccttggcctcccaaagtgctgggattacaggcgtgagccaccgcgccctgcctaacaatttttaattttatttttatttaattttatttattttcttgagactgagtctcaccctgtcatccaggctggagtgcagtgttacgatctcggctcactgcaacctccgcctcccgggttcaagccattctcctgtctcagcctcccaagtagctgggattacaggcgcctaccaccatgcccagttaatttttatatttttagtaaagatgaggttttgccacattggccaggctggtcttgaactcctgatctcaagtgatcagctgatgcgcctcagccttccaaagtgctgggattacagatgtgagccactgtgcctggccgaaaacaattgtttaaaatgtgaccaaagctgttcatcttttcttcatggattctgcatctcatgtttaggatggccttaggattataaaaatattttcttactttttccccagtgcttttataattttcacagttggctctgccgtgtgattgcatttgtgtattgtgagctagaaatgatccccccgcccccgatggtagccatttgtcccggggacatctgttgaggcccccatccttccccccgattggaagtgctgcctttatcatataataaatatccatatggcccgcttcccccctttctagccttaacattgctctgccttttctgccgtgccagccggcttcagttgtgccatccattcgggatgtttcagtccctggtagggcagatcctcccgcgttactctttctttaaaaactattcctggctgtctttgtgcgttagctcatccagatgaatttcagaataggcttatcatgttccattttttaaaggtccccatggacttgttctgaagggagttggggtaatccttggtggaggctgtctgaagcccctcctcctctccaggtgcccttctcttctgacctgctgaaccttggtgtccatgtcctggagacgggggcagggaccccttttctgggatcagcatgcagctcagatggtattgcctcccaaatgaacacagctgggctaccccaggtcaggtgcacacccgagtgtagctgtggtgagtgcagctgtggtgagtgcagctgtggtgggtgtgttcacatacacaagaggctgtcgcccacgctggagcccccgaactggaggagttcaaaacacagccctcccagcagggcccttggccgggagaacaggggaaggcgctgcccccacctctctaaagagtctccgctgtgttctagacaaatacaacgacttcatcgaggccaaccgcattgaggacgcgcgggagcgaatgaggacgctgcggaagctggtaaggagagagaggtgctgtcagacacgaggtggggcagctgcctgagcacctctgtcccaggaggcagggagtccggtgctgcccacgacccctgtggccttggagaagccccgctccactcagggcctcagtttccccgtccatacaagagaacggggggttagaggataggttccagactccctgaggcatggtagtgggagatctttggggcatggtgatgacgggggacaggggcaggcccttacagcctgtccccatgcccctcctctctcctgctcagatccgggatctcccaggacactactatgaaacgctcaaattccttgtgggccatctcaagaccatcgctgaccactctgagaaaaacaaggtgggtaggagtcccgcatggagtctgggggaggcaagcacggacttactgtgtgagggccctcagcacgcactgagctccagcaggtccagtaactcaggcccctctaggcacgccctcctcctatgactgctccgtccccaccccgctcctacatgctggtcagtgctttcccccagagagccatctcctgagtttctgagggctttccagaggcagggaaccccggccccccgtatccgatgcattgccatcctccgacttagctcaagtccctcgcattgcattttcctcatcaaaccccttatgccttctggttctgcagtggggaaaatgaggggagtgataggattttttgtgttttgtttgtttgtttgtttgttttgagacgaagtctcactctgccgctcaggctgcagtgccttggcacgatctcggcttactgcaaccttcgcctcccgggttcaagcgatgctcctgcctcagcctcccgagtagctgggattacaggcacctggaagtgatcggattatttcccaggcctaaaataacccctgggacctccaacatgtttcctactgcagggtctcccactgctggcactgaccactcagggctgccttgtataggtgtgcaggttgggcactgctcatggctgctgggcctggggatgaaaggggctgaaatctggtctgtgctctactcatcaagcatctccatgcccatacaagggggtgtccaccctctaagctggggactggtgaggatgtagttggggacagaggcctcaggtgccagagtgagggaggactgaggtcaggatgttgacagtgacctgctttccctgctgcccagatggaaccccggaacctggccctggtctttgggccgacactggtgaggacgtctgaggacaacatgacagacatggtgacccacatgcctgaccgctacaagatcgtggagacactgatccagcacgtaagcccctgttccggggggcgcccggcagcccctggggcccaggccatgttcctctgagcccctcgctcttgctccgcctggcggagtgtgccccaggaagggctcggcagctttagagcatgctgctagggtggtatatactcctccaaagccatgggctgcatttcaaggcaaggcaggaatggatcctggaatccctgctgccctgggatgttgtgtccccagcaggagagtcaagaggcccccgagcttccgagatgcctgggaaaggtagaagaggaggaagggcagggaaggtgctactggtggagggcggaaggggcagcttcagaagttggcccctggagaggtgtcctggcagacacgagcagacgggggccaaggtctggcctgatatcaggaggccccggctctagtgactttccctgctggccccactgaggttttggggagatagtggtgatgttcctggtaacaaggggtggatggggcagggcacagggccttggcctgaggcaggatcctgcaccagtgcttggcatgtactgggctggccacctcccttctcatggcttcctggatgccaacagccctggtcctgtaggttcttgttactgtgcatgggcggaggagaacccagagtggccagcagagggcgcagaaggccttggttttcgagagcccaaccctaaggcagcactgccgccttctggtgtgcacacggatatcattatgaatcgtagattttccatttccaattcttgttacagcccacaaaggatgagaacagagcccctcctgccaggggaaataagactggcagctggtcagaggaagggaagcctcagtcccaagccccctagacactttagggaaggaaagctgggccctatcacccccattttacagaggaggaaacaggctcagagaggcaaagcaacttgctcatggtcacacagctaataagtggcagcccaagatttcaagccagatctgactaaccaaagcctgtgctttcctcctgctatcaacccaaaggccagactcctgggtccctccttgagctggcttgggacggagggagggggccagggtaaggaggcgaggtggtgagcagctgagccatgttaacagccttgcttgcccatctccctccttcactgcatgctcagggctccgagccacaggagggaagatcacagcctgctgcatccggacactgggaacaccactccagagctgtctgggaggccagggctgccctgcagcgtcggggatcctgatgaggccttgggaaagcttagctctccagggcaccagggagccccggaacctcccgtgagggtgtgttttgggggcagcagcagggaagaatgggtgtctggccctgtgctcctggagaagtccctggaagcccaaggtctgaggtcagctgaggtgtcaggaactgcagccttcagggaggaaggaggccaaagccccaagggggagtccctgctctgggcagggtggagaaggtggagtttgtctcatttagcactgacactactggcacacagtggctactcagtgtttgtggagtataaatgactgagtaaattgctaattgaggttacgtcaggctgggttttctttctctttctctctctctcttttcgctttttttttgtttttttgttttttttttgatagagtctcagtctgtcgcccacactggagtgcagtgggcagatacggcccacttccaggctcaggcgatcctgccatctcagcctcctgagtagctgggactagagatgccaccaccacaccacctggctaatttttgtattcttttgtagagatgaggtcttactatgttgccagggctagtcttgaactcctggactcaagcgatcctcccatctcggcctcccaaagtgctgggattacaggtgtgagccatcacgcccagccaggctgggcttttctactcagagattcattcccgagagctaactgagctagtgtccttcccttctctgcctccttggcatctgaacgtaaccagccctggatgattgtcgagggaatgagccacccactctgcaagccctgaaagcctgcccacccaagcgtgccagctctgtctagcctggaggctccatagccagggcagtgctgctgtcacttggggtacccagaccagtcttcaggtcggaaagagcgtggcaactgaggggtaaagaggaacagcgacttgcccagggccacgcagcaagataatggcagagcagagaggagagcaaacctgggtgtctgatcttgcagcgggcaagttgccaggagcccctacctatgtttacgaagtcaaatggaacccaaacaaagatcacccagggcatttgctcagggactcactcagcaaaggcagcgatacctaatgtttctcagcctcagcactagtgagcgctggggtccagataagtctttcttgtgggaggctgttctgtgtgttacaggacatttagcagcatcgctggcttctacctgctggatgctgggaatatcactctagttgtcacaatcgaaaatgtctccagacattgccaagtgcccactggggtggggggattgacggcagtggctctggggccagcctgctcctatgtgctgtgtggccttggacaagttccttacctgctgtgcctcagtctccacacctgtaaagcagagatgacaatactgtttacctcacatcgttgtgaatgtctgctaaagcactcgcggcggtgcctggcaggtcctaagtgtcgtgtgagaacggactgtcatcctcttcgtcgtggtcattattccacgccagagacagatccccgtgctgggaacacggaggtgaatgggagcctgctcagaaggaatattgccagcgggtgtggtggtgcgtgtctgtggtctcaactacttggggggctgaggtgggaggctgcagtgagccgagattgcgaaactgcactccagcctgggtgacagagtgagaccctgacacacacacacacacacaaaaatccattaaaaaaatgatgcttctcattcatttattcttttaataatgtttatcaaagtaagagctgcgtctctttgtgctctgggctatgcccaaggaagccccacagaaggacccaccccggccctgggtgcagggctggggtcgtagtcatggagttcttgaactgccttagaggaccatgatgagaacttagccaggcagagcagggagaaagggcatcccaggcggaaagaacagcacgtgcagaaacagggtggcaggaactagtgtggattcctcttgagagccgtggccacccgggcgcttcctgtagacgctgtggcttgcagagtacttctgggcaccttccaacctgcattaacggctggcttctttgggccgatcctcaggcttcccctggtcagcctgtctctggaagccacacttttgaatagcagtagctgacatctattatacattaacaatgtgctgcactcgacgttttccatacagtatttcatctcaatcctcctcaggcctagaaggaggtactcacatcatgcccattttagagataagtaaatagacttacagagggaaagtaacttggctaaggtgaacttgaaccaagatgactgactccagagcttccatttttctttttctttttttttttttttttttttgagacagagtctcactctgtcgcccaggctggagtgcaacggcgcggtctccactcactgcagcctccagctcctgggctcaagtgatcctcccacctcagcacccccaagtagctgggattatgggtgcatgccaccatgccgggctaatttttgtatttttagtagagctggggtttcaccctgttggccaggctggtcttgaactcctgacctcagctgatgcacctgcctcagcctcccaaagtgctgggactataggtgtgagccactgtgcccggccagagcttgcatttttcttatcttcctttgctgtcttctcttctatctctttcttctttcccttctggccttcctgtgctgtttgagttaatcacatgtcagatcatgagcgataataactgaggctcatggcgtatgctcaggcaagtccccttgtttcccctcttcattcccctaggtgcccactcttaataggctaatatgtgtccttccaggacaccttccacttattgtaaatgcatggctacccttaaatatatataatattctttgtgtgttttaagtctacataatgagattataaattgcctgttcctcttctttcataggtgttgaggggggtaaagggtaattgccttaatttttattcatttattttttttgagatggagtttcactcttgttgtccaggctggagtacagtggtgcgacctcagctcactgcaacctctgcctcccgggttcaagcaattcccccacctcaccctcctgagtagctgggattacaggtgcgcacaaccatgcccagctaatttttatatttttagtagagatggggtttcaccatattggccaggttggtctcaaactcctgacctcaggtgatccgcccgcctcagcctcccaaagtgctgggattacagatgtgagtcactgcaccgggcctgtcactatcaatttctaatgcttatcagtttctgtgtcttccttccaccacatctaaaagccaaaagtggtagggtgcagtggctcatgcttgtaatcccaaaatctacaatttttttttttttaattagctgtgcaaggtggcacatgcctgtagtcccagctattcaggaggctgaggtgggagaatctcttgagcccaggagttcaagggtacagtgagctaggatcaggccacagcattccaacctggataacagcgagagaccctatctcaaaaataaatacataaatacaataaaagccaaaagtgccttagttatttcttggagcttgccgaaggtcatctctttacttgctcaagtattcagttaagagagtctttgtgtagtaaattttctgatgtctcaggatagctttatttcaaggccaggtgtggtggctccagagagcaggaggttcacttaaggggtgattaaaacaatctgtggtatgcctgtaatcccagcactttgggaggtggaggtgggcggatcacttgaggtcaggagttgagaccagtctggccaacatgacgaaaccccatctctactaaaaatacaaaaattatccaggcgtgatggcgtgcacctgtaatcccagctacttgggaggctgaagccagagaatcacttgaacacaggaggcagaggttgcagtgagccaagattgcaccactgcactccagcctgggtgacagagtgagattctgttggaaaaaaaaaaaaaagaatagctttattttacactcagatttaaatgagagtttagcagggtataaaattctaggttccttcaacacgtcaaaacttactttcttgtcttcttgtgttttgctgctgaaagttccaagtacctgtgatacgtgttcatttataagcaatctggattttttttttcagaaaacttagaattttatcttcaagattctcaaattttacaaaatatattaaactgtgggggtctttattttctctcttgtttggcctttatgagaaagctctcgcctcctgcccctcaggaaacctccaacgcctttctcctgtcatttccttttctgggctgagtacgtgacacccctgttgtcagtgtggcacccatgggtggcaggtggcgtggggcacactcggctgtcacagccatggacctggccaacactaacggcactggtgcctccctgccccccggctcgctgtggggagtataccacaggggtgtgcccaggacagtgtttagagaaaagcaagtaaaagcgaagctctccctaagcctatctcctgtctgaggtgaatgctcccactccctgccgtgtctcctcccacactggggtcccaccttttctctcccccagggtttttcatagtctgtggagtcaggttttagggtccgtcaagctccctctgagccctcttttgcagccccgccagcctggggtttgttgagagagaggcgccccttgccgcctgagcgggtcctctggaatgagcaggtggaagagactcttctttcccatgctgatttcatcccttccttttgtcttctctgcagtcagactggttcttcagtgacgaagaggacaagggagagagagtaagtgatgccgcgggctgggctggcatgggggctggtctggggtgagccccagtccttgggggtggggcaggcagcgggacttaagccggggaaggtgtctgtccttgaggcttccctcaagtctggtggaggaaacacagaccctctcctcaggagcccctagtctgatagagaagcacaaagcttgccttcaggaatccccagtcgaaatgggggagatataggccttgctcagagggaacccagttcaggagtaaaggcagctcctgccctccaggctactgagaaggacttaggttggaggagttccagtctggtgcgggagacacagctcctgcccctagctgaaggggccgctctggccttcgcggttcccaggtgttgaggaaggcacaaaactgtctaataggggacatgtaggaatcatcctcaagagcgcccggctgatgagggagacggtccctgccccagtgagcccggtctgatggaggagacatgggctctgtcatcagggcacccccctctggggggttggcagcccagcatctgagggcatgccagctgacccctcctcctgttcgcagacccctgtgggcgacaaggagcctcaggcagtgcccaacattgagtacctcctgcccaacattggcaggacagtgccccctggcgacccggggtcaggtgagcgcaggggcctgggagtggggaggcgggaggttggacactgcattcctgagggtcccaggtgcctggccagatgcccagcttccctgtgccaccccagcggggccctcccctgccggccaccatggagatggggctgttgggggccttctccctccctagggaagtccagcttgccccgtgcccacctcctgtctgcgcagctgccccgccccgggcagggtcggagctttgttcgccctctctcactggtttctttcctcagcctttaatttctcatgggctggctgtgtccttctgggcatgttcctctttttaatttttcttccttttctccttgcacccccgcctctccctcctcttctccccgtgctctcctcccacccccttctcttctcctccccctcccctcctccagcggacctgttggagatttaaagggtacagtgcggtgtcgcggcctcggtcactaacagtggcgggtgattataagaaggctgggtgggcacagcggcaggcagaatgtcccggactgtgaggaccccacgctgacatgccagttacccctgcctgttatccacttaccccagcagtccatgcccctcccattctaaagccccttctcaggaggaaggaggcactcactgggcccagggccctccccgttgcctggacacctgggcatcgaattgctgccctcctgcagtgccacagaccctgcggcctctctttgccgagtctcaccactgctagtcatccaggctggggaccgacactctctggagaccagcgatgccacgcccagaagcttctctttatctctaactcctgcctcagtcaccccaatgggccgcctcttcctgcttaagaaaccggggccctaagtcctgtttgcagggcctgtggccctctcatggcagaggacagatgatttacatgctcagagacagatgagggccactccctttgtggctgcagccactgactcctccccccgccatggttgtccctccctttagttttagcatttctgttcgtctctgacagaggcacacaggagctccctagtcaccagaggcaggctcaggaggggccagaagacatgggggtgggacggcagagagggaccccatgtctcttctaatcacccgccgccccccgcgccctgtgtgtcgtgtgtggtcgcccatcttgcttttctcaccttgtgcagggggaggggtccggagaggggggcgtctaacttgcctgccagagagtgtggattaaccgcacctgcccactaccctgtgggaccccaggaggcccttggaccaacctgctccttctttagccttggaggggacccaccaggacgtgtttctggttccttctccaccccagtgatattaagggagtgggacccaagtcccatagaaatcatgcttttggtctccttcataactgggtgataactggggaccctgcccatgaggcagggtgaccccaggtccggaggtggaacctatcaaggctctaatcaccagcccactccacctcctgcgtcccacccacttcatttttgcccttttatccattattcatgtggtccctcttctctgttgtgtgctcgggggtggatgtagggcacccacctctctgtgcactgtgtggtctccatttctccagagcatctgtgatttgctgtgtttcactgtggtggtttccatggactgcacctgatatttggcattttctctccagtgcttcagagtaacagggacgggcggggaaggggagaggaaccaggctcaaagacaatgcccccttgcccttagccatcggtaaatgaggggccagtggctggcagcctgatgtcacttcctgcctctagaggaagtggcagttaacatcattttctcctccatccctctcccatagatggacatcagatgtccatcatactcctagggcctggggagatctcatgtttcagaattccctggtttctgaagcctttgaggagagggaattgtgtgcataagactcagctttcttttttcctgatgcaactttcatttttttttctgtctttcaccaacagattctaccacctgtagttcagccaagtccaaggtacgtatgaaggcaattctgaaggcttgatccctgtacaaggcagcccactttggtttttgttcaagggaattgagggaatggcagttggaccatggggaaagttgatggtccctgggagggaaggcaggaggtaccgagtgcccaaggtaagctgagaaattgcttaccttggcagtgtttggtgaggcatctgctgtagtagaaggacctggcctgggagttatgtggctaggaggcaatgtcactcagtagttagaagcacagactctgcagtcagacagtcctgggtttgagttctggctccaccatttagtagtttgggacattgggcaagttacttaaccactttctgatccttagcttcctcatctataaaatgggaatatcagtaaatctgtggggtgctataataaataaaacagatatcctttaaggtctttggagagcctaaagcaagcagaaggaaataaagagaggagcagaaatccatgaaatagaaaacagttgaaaaaaagcaatgaaaccaaaagctggttctttgaaaaaaaatcagtgaaattgataaacctctagccagactaacagaataaaaagaaagatggcacagattatcagtatcagggatgaaagagggacatcactacagacccctaagttattttttattttttatttatttattttttttgagacggagtcttgctctgtcacccaggctggagtgcagtggcaccatctcggctcactgcaagctccgcctcccaggttcacaccattctcctgcctcagcctcccgagtagctgggactacaggcgcccaccatcacgtccagctaattttttgtatttttagtggagacggggtttcaccaggttagccaggatggtcttgatctcctgaccgcgtgatccgtcccccttggcctccgaaagtgctgggattacaggcgtgagtcactgcgcctggctatagacccctaagtaattgaatttatgggcataaagttgcccataaattcaataacttaggtgaaatagaccaattctttgaaagattcagactgccaaaactcacttaagaaaaaatagataacctgaatagtcctatacctcctaaggaaattgaatatgtaatttaaaatcccccaacaatgaaaacttcaggaccagatggtttcactgttaaattctaccaaatatttaaggaattttttaaatttttaaacaatttactttaataattttaaaatattctaaatagaaaatagtataattttaaatattgatatatttaaatagttatttaaatatttgaattatttaaatgttatttaaatagttatttaagaaataataccaattctccactatctcttttggaagataaaagagggtggctgggcaccatggctcacgcctgtaatcctagcactttgggaggctgaggtcggatcttgagatcaagagttaaagaccagcctggccaacatggtgaaaccccatctctactaaaaatacaaaaaaattagctgggtgtggtggcatgcgcctgtaatcccagctactcaggaggctgaggcaggataattgcttgaacctgggaagaggaggttgcagtgagccgaggtcgtgccactgcactccagtctgggcgacagagcgagactccgtctcaaaaaaaagaaaggaaaatagaagaggaggaaacactttccaactcatttatgaggccagcattaccctgataccaaaacctaacaatgcttttgaaaaagatagggctaattcatttgataataccacaaatacttgttgaacgtctactttatatcagtactgtgctgggtactgaaaatataaataatgagccaaacagataggttcctgccctcacaaagcttatcttctaatgagagacagacactaagcttatgaagaaatagactatctgtctggcaggtttggaggcacagtggaggcagaaaccagatggaatgagctaataaagtgagggagggaaaagcgcatacgtagaccactcttgtgagaagtccgattgtgaagagatatttacagaacaaaaatggaaaaatatgtggcttgagggaaactttcattaaaagatgaaagcagccaggcatggtggctcacgcctataatcccaacacatttggaggccgaggcaggaggatcccttgagcccaggagtccgagaccagcctggacaacatagtgagacctcaactctacaaaaaatgcaaaaattaaccaggcatggtggggcatgcctgtagtcccagctacttgggaggctgaggcaggaagatcatttgagcttgggaggttgaggctgcagtgatgagccgtgatcatgccactgcactccagcctgggcaacagagcaagatcctatctcaaaaacaaacaaacaaacaaacaaaaaaagacgaaagcacatatttacttgccaatgggaatgatccaggtgagagacagagagagagaggaagagctgggcccagagcccgtgaagcagcagtagcctgtgctcctagcagatgcatccccaggtgtagtaggaagagagggaggtggcaggggcacactggcaggcagtgttggcagcaggtcattggggtcactcccagctgatggctctttcctcagcgaagtggaaggtgaggacctctgctgggcgtgaaggtggcagggaaagtctgagcagagtgaaggaagtctgaaatgggtcccatgaagcaaggcagatttcctgaaggggccgagaagcatcatgggcaggccgaggcctctgaaggctgcggccccttctcgagagccagcactttgcccagcagccgtgccccgcccctttgggcctggcttctccacactccccggagagccccttctgagtcccttctggccagaagatgtcctcatttgcttcctgtgaccccaccgtgtctccagtggactcaacactgacctccccagagctcacaggccactgcctcccggaagcctcctggcttgaaattccttcctcctgagacgctagcagttaccgcttcccagtctgggcctgcctgactcctgcattaacctgggaactcctgcaggaggccttctcaatcacagggccttgaacaatagaacgtgcttttcagagagtacgtctttactgtaaactgactcagagacttcactgtgacccagtgagttcatcacaatcactagcatgagatgaaagaggagggaatgcacatttactgagcacctactaggtgccagccagtatgcagataacttttcacgaacatcggtttcatttcatttttacggaagacccttgaattttgtaccatccccattttacagatgtggggaaccaaggctcagagaacttaagtaactagaagtttgggcatattcttgggcctcaggcaggggagctggttaggtggcctccttccttggttggtgctctggtatctgagttctgatcctctgttctcaggctctgagtgtttcttgattttctggcacagggactggctctgtcctgagcctgagctgaaaccaaccggccaagcctctaagaaacggaggcacagacgaggctgccggtctattaagtacagcgataggaataactgttgcagggacagggacgttgagttgtgtgtgccgcagtggtctcagtctcatctactggggagaccaggaatcggagtcagggaagcaggaggcaccaggcatctgagagcctgcggcctcctgtcccggctgtaaggaaggggctgcctcgggcaccagggcctggcctcccgccaggctgtgagctctgagggtgggcacaaatcctgcaagtgccggacattcacgactgccagcctctgtctctcttgcctgactctaaaacccaggtctgtgatggtcaaactgtgttccctggagccaccatggggttgtgaccaccaacaggtgtatgacaggaccaagcgtgcagggatccaagctcccacggcctccatctgagccactcttggttctgtctcacattgctgggtctctagggaggattcgatttggacagagtgctcccaagctcatcagaaaccattgttctagatgtgacagtcctgtctgtagacgttctccaggctgtgtccaggacacccaggcggcgtcggtgccccaagttacagccacattctgatcttgcctccctgtgtggatggtttaggctgtcccgggtaggagtgtggccaggcacacatggcagtctctcagctccgtggtgggtggagtggagctgttcattactcagaagcctcccttatcatctttttttttttttttttttttttttttttttttttttttttttttgagacaggtcttgctctgtcacccaggctggagtgcagtggcctgaacacagctcactgcagcctctaactgctgtgctcaagtgatcctcctgcttcaacctcctgagttagctggactacaggcacacaccaccactcctgcctaatgtttttgtattattttgtagaaatggggtcttgcttctttgcgtaggctgttcttgaattcctggcttcaatggatcctgctgcctcggcctcccaaagtgctgagattacaggcatgagccacggcaccccactctccttatcatcttaattccaagttcttgaggaaggggaccacttttgtcttctctggtggtccctcacctactgcttagctttctttacagcctgcaataatccccgagcacccccactggtacagggagaagtctagctcctgaccaggctctgatttccccggccctgccctattcaagttcctcaaattccttgaccccaacccttgccccataagaaacctccccatgaccctgaccctgacagagaactggctgtgaaaatttttgcattgacaacagatattggaatgcagggattccctatctacttcaggcaccttcaagaatcagaggaggccaagcatggtggctcatgcctgtaatcccagcactttgggaggccagggtggggagatcacttgaggccaggaatttgagaccagcctggccaatatggcaaaaccccgtctctactaaaaatacaaaattagctgggggtggtggtgcacgcctgtaatcccagctactcaggcggctgaggcaggagaatcgcttgaactggggaggtggaggttgcagtgagccaagattgcaccattgcattcccagccttggcaatagagtgagactccgtctccaaaaaaagaaaaaaggaaagttatgcactcttgctccagaacgacacctatctacacaaatcctgtggcaagttcaaggagtttatggacccccaaagccaacccagggactccagttaacagcaccttctccagagtattccggctggtaattagcttgtttggcagaaggtgtcagtccagctgtcaataatgcctttggtcatcgctgattcctaagtttaaagtattcaacaatatgaatagttacaatttattgagcatttgctgtgttactgtgcttagaattactaatcctcacaaatgccctgtgagttagagataaaattgtccttattttgcagttgaagaaacagaggccagaagagcttctgtaacttgccccaggtctcacaaccagcaagtcgcctgctccagagcctcccctgtgagacagaacccgttaggagatgaggcctgccctgggtgaccctgcccggctgtgagattagagcttgagggcagggtgtgtataaagtcatctcaggctgctgtaataaaatgccatagctaggtgcctcagacaacagaaattgattttctcacagttctacaggttagaagtccaagatcaaggtgccagtgtggctcatttctggtgagggttccctgcctgtcttgtagatggtagatggccaccttctcacactgtgtccttacaaggcaaggcagaaagaaaagagagcgcaagagagcccaagccctctggtgtcccttctaataaccgcactaatcccatcaaaaggtcccaccttcacctaaacctaattatctctcaaaggctccacctccaaactgggggttagggcttccacatgtgagtttgggaggtacacgatttagtccatagcagtgagtgaaaccagctgatgactggctggtggaactgggctcatttctgtctgggtctctgagcactgcactggccaggtttgtaagcccactccacagccatgtgcttgacacctggcaggtgctccgtgtgtgtcggatgaatacactggacaaaagaaaaaaaggctgtgggcgcagtggctgatgcctgtaataatcccagcactttggaaggccaaggtgggaggatcacttgaggccaggagttcaagaccagcctagccaacatggtgaaaccccgtctctactaaaaatacaaaaattagccaggtgtggtggtgtatgcctgtaatcccagctactcgggaggctgagtcatgagaattgcttgaacccgggaagcagaggttacagtgaaccgagattgcgccacctacactccagcctgggtgacagagggagactccgtctcaaaataataataataataataataataataatgctctagcctggtgcaagggtcccctgtaagctctgcatggagcccctgcctgcacctggacacctctggtgacagagacctccatcataagattgctgtgacagggagaaagttcattatagtgacctacatccaggtccttgtcacttccgtccattgctcctgctggccccctgctttcctgcagtatatcctggattaactccctgatctctctgtgaatctgctgacctctgcattccttggaagagaaatcagtctgacctcgttgcttctggaaccagctgggatgagagggtagtttgatcaggtgatcctagcggcctcttaagtctctcagagagcactggccaggaaagaaagcagtactggccaccatatgctccaggctgatcctagcagtgcaaccacattgcacaactccagggggtgccttctggtgttgtgcattgtgggcaaccatggcccaggagccacatgcctgtgactcctgagtccctgacatgctctggttttctcagaactaattaatgtgagagcaaggacagtggctgcagtggccacaagaggcatctgggtctccattcattattacaccatggctgaaacaagaggtggtctgtgaggaggggttgaaagggcagcgtgaccttgtcaggtcattccagcccaagacaggaaccagtcccagcgtctgcttctacaaggcttcctgtgttaaggggacttcattcaccaattgtttgttcatttcatgtttattgagcacctgttatgtgccatgcagaaacaaccaagtcacagcctttgctcttaaggagctcagagtttgatgaggctgatgtgagaagagctaggagcatagtgagatgacaggaacatagagaagtgatctcccatctcaggcaaagggagggctgggaagtggctgtacagaggaagccatgttcgagctgggccttgtagggtgagtaggagctcatccagcaaatagggcagggggacattaagggctggcagcaatgtaacagtgtaggtcacatcaaaggaagggttggtagggctgtatttccacagtgagggctgtgttggggttggggtcagggcagagcagggcagtaggctgggaaagttggggctgggttatgaagagccccatgtgctgaactggggaacttgtgctttatcctggtgggtgctggggcatgcaagcttctgagcaaagctgggtgaggatcagattcctgcttcagaatggtggctctggaggagagacccgggctggggcaagggtggaggcaggaaaccctattaggaggggcaggagggcccagagagggcagaatgagggcctgccggaggaggaggaggagttggctttgggagccatttcaaaagaatccaggacttggctgtgggtggaggagagagggaggagtcacaagaccgccctaaggtgagcagtgtgaatggaggcagtttggggcaggggtaggtaggatgctgtggttccggataggtgagttttaagagcctacagacacccaggtagaaatggattctcaatgggaagaagagtcccggagctcaagtgagtgtggtgttggacagggaggcctggatagcagcgctgcttgggaatggtattttctagggaacacgaacagagaaggcaaaggggccaaaaacagtcctgggaacactgagtctcagtggggaaggcaggggaaggcaggggcggggcggggggcgggcaagaagaacctcccaagaggcagaggagaggccagaagggcggatgaaaaccagcttccagaaggccatgggcggcagcatgggccctcctgggaaagtgtgaaaggccaaggccccaaaacaccacagggtgtagcagtgagggctggttcaggtgagaacagcggcatgaagttgcccaacttggggttggaaatcacagtttgggagcggctccaatccaaaccatgacaccatacgggatctttcagccacttgcaggggcggagctggcggcgggattgacctgggattggggattggcggggtggggagctggtggggtccggcggaaaggggaggacgtgaacttgggcgggttgccctggagaggcctgtagatgctgggcaggtgggaaggcaggtttccaggtggcagcgggtggagaggaggtgggggacttgtggtcagagagcgcccctggcggggatttggggatcagcatgcaggaagctctggtgatgacaccccaggggcgtgtgtgaaacggattcaggctgccaagcgttattcactgtggagagattgtcatcaccagagccgtgtctaaaggatttagccagggctggatacggaaaacagaatggaagggggctttgggagaccagcccacctcacaagaaagagctgagagcctagatttgggccagcgggggtagtctctggacggagggcggcacggggctggaggaggagcgttttatgatgcggccgtgggtgctggccttggctggggcttgtggcgactgggtgccgtgacgtgggggtggaccgggtagagcggggtcggcagggggccgagtccgggcgccccccgcatcctgacctgtctcccacacagggttcgtgggcccccaagaaggagccgtacgcccgggagatgctggcgatctccttcatctcggccgtcaaccgcaagcgcaagaagcggcgggaggcgcgggggctgggcagcagcaccgacgacgactcggagcaggaggcgcacaagcctggggcgggggccacagcgccggggactcaggagcggccgcaggggccgctgcctggcgccgtcgcccccgaggcccccggacgcctcagtcccccggcggcgccggaggagcggccggccgcggacacgcgctccattgtgtcgggctactccaccctgtccaccatggaccgcagcgtgtgctcgggcgctagcggtcggcgggcaggggcgggggatgaggcggacgacgagcgtagcgagctgagccacgtggagacggacactgagggcgcggcgggcgcggggcctggggggcgcctgacacgccggccgtccttcagctcgcaccacctcatgccctgcgacactctggcgcgccgccgcctggcccggggccgcccagacggcgagggcgcgggccggggcggtccccgcgccccggagccgcccggctcggcgtcgtccagcagccaggagtcgctgcggcccccggcggcggcgctggcctcccggccctcgcgcatggaggcgctgcgtctaaggctccgcggcacggcggacgacatgctcgccgtgcgcctgcggcggccgctgtcgcccgagacccggcggcgccggagcagctggcgccgccacaccgtggtggtgcagagcccgctgactgacctcaacttcaacgagtggaaggagctgggcggagggggccccccggagcctgcgggcgcgcgggcgcacagtgacaacaaggactccggactcagcagcctggagtccaccaaggcgcgggccccgtcgtccgctgcctcgcagccgcccgcgcccggggacacggggtccctgcagagccagcccccgcgccgctcggccgcctcccgcctgcatcagtgtctgtgatccccacctcccgcgccgctcgggcgccacccctccctagagcccctttggaaccaggaggcttcaccagcctgcacctcctcttctgtggcccctgggtgcatggtgtgggtggagggcgcagcaggcagtgtctctagttggtgtgctggaactggcagggcagaggagaaggctggggccggactaattgaatggaagggggttccagaggtgatgagcagaagaggagggggcgtgggctgctggggtctgtgtccctgcacacatgcgcccgataggtccttctgagcctttctgtggctgcacttggggacccttgtggaccatggggtgtggctagggaacccctaagtttcagactaaaggaaagatcctgggtgatgctggctttttgcttctttcttctgccctcccacctcagcttgtaagcggggatgtgtgtatgtctggggagaggaggtgtagggtgcgtatgtccatggggggaggggcttgtgtgtgcagtcattgtcccaaggtgtttccagtagcgacttctgtccccctatccccaccctggtccccactttgcgcccccgggctccctgcctttggtgcacacaggatcctgcccgccccccttgccagagccagagaagggggttggggccattccaaggaggcaggactgaaaccctcaccagggttactccccaacatccttttgcctgagtcaccctctaagcgctttaaccacgggcagctgcctgttccccagacagtttttggtggggggggtccagggtcccccttgctggtacctccctcacccctctttttgtttttccatctgtgcctgttccttccacagcccaggcacacagaagcccaccttcttccccttaggaggagggatagtcaacacccctgctgtctctctgtcactcacacactgatttatggggtctgagctgggctgttcctgcaggatggacaggacccagcgccctcttctccccacaggctgtaaatagacttccaatcaccaggccagcccccacacaccctcactcattccagggaagcccaggtaggtggtgaacccgctgccacgtctatcagtcctcttgttttatgcaaagatttactgtaaagtagatttctttccctccctcccccattcttttattgtaaatattgtctctaaatgtgtaacatattataaagaatttataaggatttttaaagatgttttgctcatttacaaaagtgttgtaacagtgttggacaaagccttccaccccatgtccgcatggctcctttcactgtgtccttgacacacctctctggcaacaactaaaatttcctgcttctgaaaagtcctgtcttaaaagtacagtctatatcttggaaataaatagctttcctcaaggcatgagtcagctgtctcacttgttttggagggaaagggccagagtggggctgggagacaggagaggtacctggcccagggaaggagggcgatggggactggaccaaggggtggcaggacggaggcagactttttcctggtgacctttttgtaagtgtcctgggggactggtcaatgacacagggacagatatgagttggaagagtgggtggccctcattgctgtgcgaagtttccaggcacctgctctctattcctacagagcccaggcaggtgcacaggcaccttctcaggcctacctggagcttcacaatggttccagcagtcctgccccgcagacaggaggcttgggccagctgtcgtaggcactccaggcccagataatattgcaaaaggacagaatgggttttgcccgttgtccccttcacatgtgtaagcttacaacatggggtgggcgtccttctgtgccggcggttgctttgtagttgccccagccagtttacaggctgcctctgctgagcctcgcagctttctgtaggaagaccaggtgacagtcattaaagggaatctagggagggctggggcagtggctcacgtctgtaatcgcagcactttgggaggccaaggcgggagcccaggaatttaagaccagcctgggcaacatagtatagtccctccccctcctctattatatatatacatatatatatatatttaaatctgtatatatataaagagaatctagggaggagcccaggagctgggaagagctcagttgctcactgaatcctatgccccaccctcccaagtcgtttctgttgggcaaatgagcttatagcattgtaggctctgccagctccaagggctttacacgtcttattattttttttatttttattttttttgagaccgagtttcgctcttgttgcccaggctggatctcggctcactgcaacctccacctcccaggttcaagtgattctcgtgcctcagcctcccaagtagctgggattataggcatgcgccaccacaccaggctaattttgtatttttagtagagatggggtttctccacgttagtcaggctggtctcgaactcctgacctcaggtgatccgcccgcctcggcctcccaaagtgctgggattacaggcatgggccaccacacccggccaacacgtcttaaatcagtcgtccaacactcttgagcacaccaccattgttttctgcattttatatatgaggaaatggaggcacgcagcagtgtcataacttgcccagcccaagatcacatagctagtaagctgtagaaccagggtaagtttaagtccaaagaaaggacacagagatggggtaacaagcccattgggccaccttctccagactgtagtagactttgagtgagaatggatgaaaaccctgtgctctccttcaaaaataaagtaggaataggcctggcacagtggctcatgcctataatcccagcactttggtaggctgaggcagggagctcctgaggctaggagttcgagaccagcctggccaacacggtgaaatctcatctctattaaaaatacaaaaattagccgggcgtggtggcacatgcctgtaatcccagctactcaggaaagctactcgggaggctgaggcaggagaatcgctttaacctggtaggtggaggttgcagtgagccgagattgtgccactgcactccagcctgtgtgacagagtgagattttgtctcaataaataaataaataaataaggaatgaaaatatctctagatttatttttatttttattattctatttatttatttttgagacagggtcttgctccattgcccaggctggagtgaagtggtgtgatcacagctcactgcagcctggacctcctgggcacaagtgaacctcctgcctcagtctccagtgtagctgggaccacaggcatgtgccaccacactcagctatttttttttttttttttttttttttagtagagacaagatctcattatgttgcccaggctggtcttgaactcctgggttcaagcgatcctcctgccttggcctcccaaagtgctgggattacaggcgtgaatcactgtgacgggcctatttatttatttgagacagggtctcactctgtcacccaggctggagtgcagtggcgatcgaagttcactgcagcccggaccttctgggctccagcgattctcccacctcagcctcccaagtagctagaattgcaggtgcgtgccaccatacccagctaattttttaatttctgtagagacagggtctccctatgttgcccaggctggtctcaaactcttgggcaaccctcctgcctcaggctcccaaagtgctaggattacaggtgtgagccgccatacccccactgatatctctagattttaaaaaacagagaatttatcactagcagacatgccatataagaaatagtaaaggcagccttcagattgaaacggaagtacactagatggtaatttgagtccacgcgaatgaatagagaacactgtaaggatagccacataggcattatgaaagacagtataggccaggctcggtggctcaagcctgtaatcccagcacttttggaggccaaggcaggtggacacttgaggtcaggagttcgagaccagcctgaccaacatggtgaaaccctttcgctactaaaaatacaaaattagctgggtgtggtggtgggcacctgtaatcccagctacttgggaggctgaggcaggagaatcacttgaacctgggaggtggaggttgaagtgagctgagacagtgccactgcactctagcctgggtgacagagcaagactctgtctcaaaaaaaaaagaaagaataaacatttttgtagtaattattttcctttttgtctttaaccctgtctttaaaagataactacataaagcaataattacaaaactgtgttgacatataaaggtgtaatttgtatgacaataatggcatgaaggactggagaggaatggagctatattagagcaaagtttttaaacactattaaaattaggttactattaaggtgaactagattgttctaagttaacatgctaattgtaatccctagggcaaccactaaaaataactcaaaaaattgtaaatgaaacaaaaaaacagaattaaatagatgatatatcagaaaatattggccagccattgtggcttatgcctgtaatcctaggactttgggaagttgaggcaggaggattgcttgagaccagcctgggcaatctagcgagacccatctctataaaaaaatttttaaaagttagccatgcatggtggcacatgcctgtagtcccagctacttgggaggctgatgtgggatgatcgattgagcccaggaggtgagaccctgtattaaaaaaaagaaagaggccaggcgcagtggctcaagcttgtaatcccagcactttgggatgccgaggcgggtggatcacgaggtcaggagatcaagaccatcctggctaatgcggtgaaaccccgcctctactgaaaatacaaaaaaagtagctgggcgtggtggcaggcgcctgtagtcccagctacccaggaggctgaggcaggagaatggcgtgaacctgggaggaggagcttgcagtgagctgagatcgcaccactgcattccagcctgggcgtcagagcaagactccatctcaaaaaaataaaaataaaaataaaaaaagaaagaaaatatttattttacactcaagaaggcagaatcaggctgggggcagtggctcacgcctgtaatctcagcactttgggaggctgaggtcagaggatcaccagaggtcaggagtttgagaccagcctggccaacatggcgaaaccccgtctctaccaaaaatacaaaaattagccgggtgtggtggtgtgtgcctgtaatcccagctacttgggaggctgaggcaggagaatcactggaacccgggaggcggaggttgcagtgagccaagatggcgccattgcactccagcctggggaacagagtgaaaccgtgtctccaaaaaaaaaaaaagaaagaaagagagagagagagagagggtgagagggagggaggaaggaaggaagaaagaaagaaggcagaatcaaggaatagaggaacaaaaaaggcaagacatatgaaaacaattagcaaaatggcagacataaatcctagcttattagtgatacattgaatgtaaatgaatttaacaccccaatcaaaaggcagaaattggcagaatggattattatttttttccttttataagactgggtcttgctcaattgcccaggctggagtgcagtggtgtgatcctagatcactgcagcctcgacatcctgggctcaagcaatcctcccacctcagcctcccaaatagctgggactacggggccacgtcaccacgcttggctaattttaaaaacaaaatttttgtagagatgaggtcatgctatcttaaccaggctggtctcaacctcctgggctcaagtgatgctcccacctgggcctcccaaagggctggaattacaggtgtgagccaccgggcccatcccagaatggataaaataaaataaaatgatctaactgtgagagatttactttagagtcaaagacacaagagttgaaagtagaaggatggaaaaagaaaccatgtgaggagttattaaaagagagctagggtggctacacaagcatgagacaaactagactttaagacaaaaattcttactgaagcctgggcgaggtggctcacgcctgtaatcccagcactttgggaggctaagatgtgtggatcacctgatgtcaggagttcaagagtagcctgaccaacatggtgaaaccccatctctactaaaactacaaaaattagctgggcatggtggcgtgcactgcagtcccagctactcgggaggctgagacaggcgctcctaattgcttgaatctgggaggcggaggttgcagtgagccgagatagcaccactgcactccagcctaggcgacagaacaagactctgtctcaaaaaaaaaaaaaattgttactaaagatacaatatcttttataatgataaaagagccagtttatgaggaagataaaatgattgtaaacatatatactcctaacaacagatcccaaaatacatgaagcaaaaactaataaaactgaagggaactgaactgaattagaccattcaatatagtagttggagacttcaataccccactttctttttttttttttttttttgaggcggagtctcactctgttgcccaggctggagtgcagtggcacgatctccgctcactgcaagctccgcctccggggttcacgccattctcctgcctcagcctcccgagtagctgggactacaggtgcccgccaccatgtccggctaatttttcgtatttttagtagagacgaggtttcaccgtgttagccaggatggtctcgatctcctgacctcgtgatccgcccaccttggcctcccaaactgctgagattacaagcttgagccactgcgcccggcccccactttcaataacggataaaacaacgaggcagaagatcaacaaggaagtagaagccttgaacaacactgtaagccaagacctgaaagacatcgaaacactccacacagcagcagaacacacattgttctcagctacgcgtgacacactcttcagggtagacttatactaggccttaaaacaagcctcaataaatggaaaaggattgaaattacataaagtctgttccccaactgcaatggaattaaattagaaaatgacaaccaaggaaattaacaaatacgtagaatttttttttttttttcgaggcgggtcttgctctgtcctccaggctggagtgcagtggtgctatctcggctcactgcagcctccgcctcctgggttcacgtgattctcctgcctcagcctctcaagtagctgggactgcaggagtgtatcaccatgcccggctaatttttgtatttttaatagagacagggtttcaccatgttggccaggctggtctcgaactcctgacctccagtgatctgcctgccttggcctcctaaagtgctgggattacaggcatgaggcaccacgcctggctagaaatatgtagaaatttaaaaacactcctaaataatcaatgagtgaaagatgaaatcacagggaaattagaaaatatgttgagatgaatggaaactaacacacaacataacataacttactggatgcagctaaagcagtgcttagagagacatttgtaactatgtcaatattagaaaagaagaaagatttctaattaataacctaaacttccaccttaagaaactagaaaaagaagagcaaactcaaccaaaagaaagccaaaggaaggaaataataaaggtaagagtaaaaataaatggaatagaaaatagaaaaaatagagaaagtcagtaaaaccaaaagttttttcttggaaaagatcaacaaattggcaactgtttagctagactgaccaagaaaaaaaaaagagaagactcagattaatacctcaggcatgaaaagggagctatcaatacttataaaaagtaaaggggggctgggtgcagtggctctcgcctgtaattccagcactgtgggaggccgaggcgggtggatcatttgaggtcaagagttcaagaccagcctggccaacatgtgaaaccctgtctctactaaaaataaaaaaattagccaggcgtggtggcgggcgcctgtaatcccacctactcaggaggctgaggcaggagaatcacttgaacttgggaggcagaggttgcagtgagctgggatcgtgtaactgcgctccgcctagaagacagaacaagagtccatctccacacacacacacacacacacacacaaaagtaaagggataataagggaacactgtgaacaactgcatgccagcaagttagataaatagaagaaatgaaaaaattcctagaaagacataaattaccaaaactgacataagaaggagaactcataaataatctgaacagacttacaacatggaaaaagattgaattagtcatttaaaaactttcaacaaagaaaattccagacccagatggcttcactggtgatttctatcaaatatttaaagaaaaattaatacaaatccctcacaaactctttcaaaaaaagaagaggaagcaaccgtgaggccagtattaccctgataccaaagctagaaaaagatatcacaagaaaactacagactaatatcccttgtgactatagaaacaaaagtcctccacaagctaccagcaaaccggttgggtgtgacaactcacacctgtaatcccagaactttgggaggccgaggcaggcagatcacatgtggccaggagttggagaccagcctggccaacatagcaaaaccctatctctactattaataaaaatacaaaaattagctgggtgtggtggcacacacctgtaatcccagctactctggtggctaaggcacaagaattgcctgaacccaggaggcagagattgcagtgagctgagatcacgccactgcactccagcatggaagagagagcgagactctgtctcaaaacaacaacaacaaaaagatacaagcaaaacaaatcaagaaacgtatacaaaggattatacaccatgaccaagtgggatttatcccaggaatacaaggttggtttaatatttgaaaatcaatcgatgaaacacacaaaattgagagaataaagaataaaaattacatgatcatctcaatagatgctgaaaaagcaagacaaaattcaacactcttttatgattataaaattcaataaactaggaatagaaggaaacttcctcaacctgataaacatacctatgaaaaatctgtagctaggccaggcagggtggctcatgcctataatcctggcactttgggaggttgaagtgggtggcttgcttgagcccaggagtttaagaccagcctgggcaacatggtgaaagcccgtctctacaaaaaatacaaaaactagccaggcgtggtggttcatacctgtagtcccagctacttgggaggctgaagtaggaggattgcttgagcacaggagatcaaggctgcagtgagccatgattgagctactgcactccagccagggtgacagagggagacgctgtctaaaaaaaaaaaaaaactacagctaatatcgtatttcatgctattaaattaatagactgagagctttccctctaagatcaggaaacagacaagatgtccactcttaccacttctagtcaacattctactgggagttttagcccaggcaattaggcaagaaaaagaaataaaagccatccacaaatagagatgtaaaactgtctctatttgcagatgacatgagattgtatgtagaaaattctaaggaatccatgaaataggaaactccaaggggcctcaaatagtgaaaacaaaatttaaaacaaagtagcagtacttacacttcccaatatcaaaacttactacaaagctgcagtaatctcaacagtgtggtactggcataaggctagatatatagacctatggaaaagaattaagaatccagaaataaacccaaacatttatggtcaacagatacatatattttttacatccatgatacacactggatgtcaatttgacacttgacaacgttaccaagaccattcaatggggcaaatgataatcttttctaaaaaaatggtgctggaggctgggtgcagtggctcacgcctgtaatcccagcatgctgggaggccaaggtggacggatcacaaggtcaggagatcgagaccatcctggctaacatggtgaaaccccgtctctactaaaaatataaaaaattagctgggtgtggtggcgggcggctgtagtcccagctactcgggaggctgaggcaggagaatggtgtgaacctgggagacggaggttagtgagctgagattgcaccactgcactccagcctgggcgatagagcaagactccatctcaaaaaaaaaaaaaaaaaaaaggtgctgggacaactggataaccacatgcacaggaatgaaattggaccactatctcactctgtctacaaaaattaactcaaaatagatcatagactttaaaataaaatctaaaactcttagaaaaaaaaataaggtaaatcttcatggccttgaatgtgacaatggattcttagatttggcaccaaaagcatgaacaatggaagaaaaaacagaaaaatctaaaacttctgtatgtcacgagacatcatcaagaatgtgagaagaggccaggccggtggctcacgcctgtaatcccagcactttgggaggctgaggtaggtggatcccttgagcccgggagttcgagaccagcctggccaacatggtgaaaccccatctctactaaaaatacaaaaattagccgggtgtggtggcaggtcctgtaatctcagcgctttcagacgccgagttcaagaccactctgggcaatatagcaggaccccctttctaccaaaaaaatgtttttctctttttttttttcttttttgagatggagtctcaccctgttgcctaggctggagtgcagtggcacgatctcagttccttgcaaccttcacctcctgggctagagtgattctcctgccccagcctcccaagtagctgggattacaggcgcccaccaccacgccttgctaatttttatatttttagtagagacggggtttcaccatgttggccaggctggtctcaaactcctgacctcaagtggtctgcccacctcagcctcccaaagtgctaggattataggcatgagccaccatgcgcaggcaaaaaaaaatttttaattagcgaggtatggtggtgtatgcctgtagtcccagctacttgggaggctgaggtgtgaggatcttctagctgcgacaccaaaagcacaagctataaaagaaaaaaaattgatagattggacttcataaaaattaaaaactgtgtgtgtcaaaggatactattaggaaagtgaaaagacaaccaatcattggatggaagaaaaaaagtgtgtgtgtgtgtgtgtgtgttttttcctgagacagggactcactctgtggctccagttggaatgcagcagtatgatcatggctcaccataacctcgacctcctgggctcaagtgatcctcctgagctgggattataggcatgcaccaccacacccggtgggagaaaacatttgcaaatcatatatttgacaagggactcatatctagaatatataaagaacaataaaattcaacaataaaaagacaacccaatttggataaaaataagcaaaggatctgaagacatttatccaaagaagatatgccaatagctattatatacttgaaaatattttcttttttttttttttgagatggagtctcgctctgttacccaggctggagtgcagtggttcaccgcaagctccgcctcccgggttcacgccattctcctgcctcagcctcccgagtagctgggactacaggcgcccgccaccatgctcggctaatttttttgtatttttggtagagatggggtttcactgttagccaggatggtctcgatctcctgacctcgtgatccgcctgcctcagcctcccaaagtgctgggattacaggcataagccaccgctcccggccaagattttcaacatcagtagtcatcatgggaatacaaatcaaaaccataagctacctcttcatacacattagggtggctgcagtaaaaaaacagacaataacaagtgttgaatgtggagaaattagaatgcttattacatggctggtggggcagccactttggaaaacagtttggcagctcctcaaaatgttaaacctagagttattgtaaaacccagcaattctattccttaggatatactcaagagagctgaaacatatgtcaacacacaaaaaaaaacttgtacacaaatgttcatgtactgacaacctaaatatccatcaactgatgaatggataagtaaaatatgatatatccatacaagagaaaattattcagtctgggcgcggtgactcatgcctgtaatcccagcactttggaaggccaaagtgggtggatcacttgaggtcaaaagttcaagaccagcctgaccaacatggtgaaaccccttctccactaaaaatacaaaagttagccgggcatgctggcacacacttgtagtcccagctacaagtcccgacttgcagtcgggagggtgagataggagactcgcttgagcctgggaggcagaggttgcagtgagccgagatcatgccattgcactccagcctaggcatcagagagagactctgtctcaaaaaaaaaaaaaaagaaaaaaagaaaaaaaaaagaatgaaatactgaggtaggaggtgggactcgactccagagtcagttcttggacactggaccaaattgagaactagctaaaacaaagatggagtggaagcaggtctccataagacacacctaccagtgcagcatttcagtttaccattgccacggcaacagccagaaattaccacccctttccatggcaacgacccaatgacccaaaagttaccaaaattttcctacaaatttctgcacaatctaccccttaatttgcatacaattaaaagtgggtataactatgagtgcagacccacctctgagctgctactctgagcacaaggcctgtggggtagccccgctccacaaggaacagcacctctgctgctgtgcactgtcgcttcaataaaagctgctgtctaacaccaccggctcacccttgaattatttcccggacaaaaccaagaatcctcctctgctaaaccccaatttgggggcttgtctgccctgcatcagtactgatacatgctacaacatagatgaattttggaaacatgtagaaagaagattgtcacaaaagacgacatgttgtataactccatttgtgggaagtgtctgcaatgggaaatccatacagatagaaagtaaattactaattccctagggctgtgggtcggggtgaggaggtaggtggcagagaggagggtgcaggaatggggaatgactgtcaagtggtcagggttcggggagttgaaataatctaaagttcgattgtggtgatggtcacacatatctgtgaatatactaaaaatcactgaactgtagactttaaaagggtgcattttgtggtatgtgaaataaatctcaataaagccgtgtaacaggccaagcatggtgactcacgtctgtaatcccagcactttggaaggtggaagtgggaggatcacttgagcccagtagtttgagaccagcctgggcaatatactgagacctgggctgtacaaaaaactaaaattgaccaggcatggttgcacatacctgtagtcctagctactctggaggctgaagtgggaggtctgcttgaatccaggaggtcgaggctgcagtgagccgagatagtactactgcattctaaccctggtgacagaacaagaccctgtcttgaacaaataaataaataaataaataaataaataatttaaaaaagccataacaggtcggtcgtggtagctcgtgcctgtaatcccagcactttgggaggctgagttgggcaaatcacttgaggtcaggagtttaagaccagcctggcccacatggtgaaacctcgtctctactaaaaatacaaaaattagctgggcgtggtggtacctgcctctagtcccagttactcaggaggctaaggcgggaaaatcgcttgaatccaggaggcggaggttgcagtgagctgagattgtgccactgcactccagcctgggcaacagagtgagactctgtaaaaaaaaaaaaaaaaaaaaagaaaagaaaaaaaaagcagccatacaaacaataacaaactgtactctaaaacttgctctaggccaggcttgctggctcacgcctgtaatcccaacactctgggagactaaggcaggaggatcacttgagtctagcagttcaaaataagccttggtaactctgtctctgcaaaaattgaaaaattagccaggggttgtgacttgcacctgtagtcccagctactcaggaggctgaggccagaggatcccttgtgcccaggagtttgaggttgcagtgtgttatgatggcgccactgcactccagtgtgggtgacagagcaagaccttgtctcaaaaaaataaaataggataaataaaatacagtaaaacttgctctgcctatccagtgggggtttttttttttggagatggagtttcgtttttgttgcccagactggagtgcagtggcgtgatctcagctcactgcaacctccgccttccagtttcaagcgattctcctgcctcagcctcccgagtagccggtactacaggcatgcgccaccacacccagctaattttttgtatttgtagtagagacggggtttcaccatgttggccaggatggtctcgatctcttgacctcgtgatccgcccgccttggcctcccaaagtgctgggattacaggcatgagccactgtgcctggcttccagtggggtttgatatatttcataggaaacttttttttttttcttttttttagacagagtcttgctctgtcacccaggctggagtgcagtggtgcaatctcggctcactgcaacctccgcctcccgggttcaagcaattctcttgcctcagcctcctgagtagctgggattacaggcgcccgccaccacgcccagctaatttttgtatttttagtagagacggggtttcaccatgttggtcaggctggtctcgaacccctgacctcgtgatccacctgcctcggcctcccaaagtgctgggattacaggcgtgagccactgcgcccggcaggaaacatttctttgggaaaactccaaatctatgagggcttaggtgaaaggaatagagatttttccctgcccttctagtatggacatggagaggcagcatgattgtcaccctgaactaaaacacaggctgagattttgagtgaagatttctggaacgatgacaaaggggaggggatggagggatccccctgccaggtgtgccattatgagtggtatcagccagtcagcaccagtgagcttcgaggaagcctgttctcagttaaggggcacagatgccactagccccaggcccccatcctgtggatcgtgctctgtcactctgagctcagggaccacttaagccactcaatgatcaaacagtcagaaaatgcccaggggggccaagagaggatgtgcagacagtgaaggagagaagccgagggcttccccgaccactacacgtcaagtagcgcctgcctcctctccatcaggaacctgagctctgaaggcagtcagatcgcgctcaaatcttggccagagtcaaccttccccactgatagcacagaggtaataatatctattgtctgggttgttagaagattaacgaactctccataaatggtagcaattagtattataaaacattaataaagcatggctattgggagggataagttccggtttttcttttttttttttcttttgagacggagtctcactctgtcacccaggctggagtgcagtggcgcgatctcggctcactgcaagctccgcctcccgggttcatgccattctcctgcctcagcctcccgagtagctggaactacaggcgcccgccaccacgcccggctaatttttttgtattttcagtagagacagggtttcactgtgttagccaggatggtctcgatctcctgacctcgtgatctgcccgcttctgcctcccaaagtgctgggattacaggcatgagccaccgcgccaggcctatttttcatttttgagacagggctggggactggctttctgtaatctcaagggttgctgggctttggtgggtgggtgactcacggaggggcattccctgcagacagtaggcagtattgtatttgagacagggtgtccctcggtcacccacactggagtgcagtgatgccatcatagctcactgaaacttcaaactcctggcctcaagcaatcctcccacctcagcctccccagtagctggaaccgcaggtgcatgccactctgattaactttttttttttttttttttttgagacagagtctcattcttgtcgcccaggctggagtgcaatgccatgatcttggctcactgcaacctctgcctcccgggttcaagtgattctcctgcctcagcctccccagtagctgggattacaggtgcctgccaccacacccagctaatttttgtatttttagtagagaccgggtttcaccatgttggccaggctggtctcgaactcctgaccttgtaatctgcccgcctcagcctccctaagtgctgggattacaggcgtgagccaccacgtccagcccactctgagacaacttctgaaacaacatgtcagttcatgacactttcttactttaaaccctcctattgttttccatggcaccttccttaccacagcccataaggcctcacatgagggggcttctgcccaccacgctgcactttcccctcctcactcttcttggatttccttcattttccagaacccactggttacgtcccacccagggccttgtgcctgggaccctcagccaccagcgcccccaaagcccactcctcacccacccacaaggtctcctctcaaatgtgactgaccctgctactccccgccacatctgccactgtgcctcttttttgtgttctcccagcacctgccttggttgagctcgggtgtctgtgttctgtctgctggctgtcctggcagctctcccgccagacagagccccagccccaaggagtggacgagcagcgcctcacagggagtgcatcctggataggcatctggcgggtgaatgagtgcctgcctccttccaggcgtgcagcggatggttccgtttgttacttgatcttgaactgtcatgagtgcagtgattctgggagagggggttttttggctcctctcccagtttttggggaataggatggcagagagaaggcaagatctgccgacattctaaaaaggacatagggatgggctacgggcaggctgaggactggctttctgtgagtctcaagggttgctgggctttggtgggtgggtgactcatggaggggcattccctgcagacagtaggcaggttgctgccctctgtctccaaagaggtctttaagagaaggaagcgcaactggggcccctgtgatgactggaagattgtggctccaggacacagtcactaccttcagggatggaagtgaagtgatgctgaggggggagaagagattcagtaacatgccagccctcagccacgcagaacagctggaaggctgcctcggggactcttagaacatgctggaacagtggcacagccttcagaattccgggaaagcctgtaaaacccaatcaggacccatggcatacaccatggtgctctgtgtagcaggtgctgctttgctgtggctgtttgtgcatatgtgtgtacatacctaaagcatagaggtgtcaaatgcattttgtattgttaccactttacgggtttgaaagctgctgcatctagaaaagatgtttgtggccgggctcggtggttcacgcctgtaatcccagcactttggaaggccgaggtgggcagatcacttgagctcaggagttcgagaccagcctgggcaacatggcgaaacctcatctctacaaaaaatacaaaaaaatgtagccaggtgtggtggcaggcacctgtagtcccagctacttgggaggctgagatgggacaattacctgagcccagggaagttgaggctatagtgagctgtaatcatgcactccagcctgggtgacagagggagaccccgtctaaaaaaaagaaaagaaagaaaagatgggtggacccccaccaagggtcatctcactcaaagggcaggaggctgagacccaattcaggggactactggaggtcatcagccctgcttggtttcagggtaaccgtgggctttggtgtcaggcagagctggattcaaacttactggtttgtctacaacctaccagttgtatgactctgggtaagatgcccaacatctctgagttttgtcacttgcctgagtaggtagtgccggtagctacctcaccgatggttgtgagggttaggcaggacacctcctggaatgccaagctgagaactggttttttttgttttgtttttgttttttgagacaggttctcgctctgtcatccaggctggagcgcagtggtgcgatcttggctcactgcaacctccacctcctgggttcaagcgattctcatgcctcagccacccgagtagctgggattactggtgtacaccaccccacctggctaatcccaggggccctgttctgtcctccccctcatgctctgccagctgaaggccagtggctgccagggattccccacctgccaccccacccatcccagcaccttccagatcctccagggtgaagcagagaaataatgagacatcagcctataggaaggagatccaggagaggaaaaagaaacaagttttattaaagccccaaacacttggctagaaaaactgaaaaggaaagagagcagggagcgggggagaagaaaaaaggacattaaaaaagagagacagagaaaacacagcaacccttttccatttagaaattgtcaagttacaccgacagaggtcacagaatatccacagaagccatcactgctacaccaacatgggccctacagggtggatggggcagggtgtggagccggggctcaccccggggggccccctggggaccccactcagagcctcaggcctgaggctcctggggaaacagcatattgtggaaggggcaggaaatcccccatgcgagtaacacagcacagtgggcgggggctgagaggaccaggtacaggggtcccccgagacgtcttagttttctcttggtcaagcacacactgatggacagagcagcgaggcgcatgcagctgggggcactgatgtgctgcaggctgtgagagggccagcggggacgggggctcaggaagggatctggagccagtggtgcagggatgatggaacacacgcacacagaggcacacccacacacttgggtctgcaccagcacacatacctgcacacacacactcggagacacagattacatgcacctccatgtatgcgtctctatccacatgtacgtggcccacacacaagtctctggctctcggcatgtctgcacacacattacacatgttctcacacacaaagctcctctcacgctaacatgcaggtaggcacgtgccaatgcccaaacaggttacatgcacctatgtgcccacgccttcccccacacatgtgctcggccatgcctgtgggtgcaggccccatgcgtctgcacacacagtgcatgggcttgtgccagcacacacacaggctgcacgcaattccacacggatgcctcccagcccataaatgtgcaggaaccaaagagaaagaaagatgcaaatcccactgggcttcacccgagcgggtggggcggggcacgtggctccctccttctgccccttcgtggatggacactgccccccccacctcccccacaaagggacattcaactcaggacaatgacggtggggcacacattccagtcacagggctgagggtgggagctgggggcaagcgaagtagcaagcagagagtaatggagtggagggaggagggggcaccactcccccctcccctcccaagtcagggggtctctgtacagccaaatcaaaccagaccatttcactgggaccacagaagccaggccgacgtgcccgccccccagcccccctcccccgccaaaacagtggccagggagagtgccgtggttttcttttttttttcttttttaaatatttatatatatttatattacgtatattatatatataatatgtaaatatatttttaaaacaatataaaatgttaagacacttcacttaaatgtaaagagttgcctgcaattaaaagtaattgcatcatttatgaggtccttttttttttttctattttccagggtttttttttttttccaggagggattttttttttcctcttttgttatttttcaaaaaggcttgctcgccttggtacaaaaatgatccaaagctagaaaacaaggatgaaccaacaaaggcaaaaacaaaaaaagaaatgaagaaacacaacccgtttcccctccccccaaaccttcaacagctcccagctctccccaggtgcggaccttccccagccaggccccagggtctggggggctctgccttctgcgcagctcctcctttctgtgcttgctatgggggactgattctagtccccctcccctgtgcttacttcactttgtgctccaagtgggaatcctgcggccggggaccccgctcctcctcctcctcttctcctatcctctccctaccggctcctcactgtgccctctggggggccaggagtgagaaccaaaattggcctctctctgcctccccaggacccggccaaaagccaggcggcactgccaaccgcctctgcagggcaggcagggcgtccacaggccaggggcgctggctggatggtcaggcctcagggaccttcagacatctcaccagggtcaccagagccccattgaaaaactacgtctcatcctttcctgggaaaaccctcaaattgccaagaggatgactgaagttcaagtcaccccacctgcgggtcccaggtgtcttcagtgctccccgtcaagcccctctcgaccctcccatttccctcaaaccagacccttcccccaactgcaagccacaaaacctggttttctaggcccctcactcttgcccaccccatccccattcaataagttaatgccatttaaagtgctaaatcaggaaactaaaagtaccaaatacccgtccgggccgccctctcccaaggcagtgtccccgatatccggctgtccgtgcaacccaccctccacagccagcagaccaaagggcctctgccctccactccccactggacggcaaggcccaggaggccagcgcctccccagggatacagactccatggcctcacacccaccctgaggcctctcaaactccggcctcgtctccagcctgtccgtctctactccaggcccacttgggtgtgagtgggaggaggcagagcagccacagaggaagtcacagtcttgtcggagcttagacagggagtggggcatctccaaggccagtctccctaagccccgctctctggcttgatgtatgggttggtccgatgtccccgcgttcctccaggaaggtatcgagaaacgggagaggggtctcccactgctccaagtctccgtggttcagagtttgtttggagtattcttgggaagtgaggggaaggcgggaagggggtgcaggagcttcaggatggactgggggaaagagtggtgaaagagaagaaggagagatgtgacaggtgcggccagcgagaggccagctgggatcaaggaaggtggtgtgtttggtttttagttttactgtttaaaaaaagataattaaaagttaattgttaaaaaaaaaaaaaaaaacaaaaccaaaaacaccaacagatgatgggtaggggtcgctgaggagggccgcaccctcctcttcagggcacacccctcagggcgtctggagagtagggtggggtggggtggagatgaaggaagagaggggagaaatggcaggagtgagggagggggacaggcggggcagcggggtgaggggcttctagaaggagatggaagaattccttgccccaaaggaagtcaatacagggatagaggttctggaagccgagggcttttctgagactgggctcgaggtctcattcgacccgctcatctctttagatggtttagtggcctggaacaaaaacaggggtcaggggtcagagagcggaagggagcgcctccatgctggcccccagctgaagttttaaaagtggaaaacctccacaaatccaaggaaattaactgcaaaaggaagaagccagaggggcatctggagagaggggtcccttgaatggtggaggggtgggggcagaaaaggggggggagggggcacgaggttggacaaagggcctgggtggtcagagggcaggcccatagttactgagagcagagagagaagcagagcgaccagagaagcacagaagaggccgcgcccaggatgggcagatggggaggtgggggtgggggagggcaggggaggggaggaagaagtgaaacattagctgggacaggggcacaagccctgcgggggacgggggtcagggtggggaaaggctcctagtcccaaatggcccgctgtacagccagagccccttccagcttcatcctggtggcaacagaggagggggcttatcctcccaggggggaataaacacttcaaagaccccgtccaccaccaccaccaccaccacctggaaatctgagaagaaggcgctgccgcaccagcctcccgcccagtgcaggaggccccactgcatgccctgcaagcacttgtcgccccagttggtaacaggaggctactccctcatgacttgtcctgccctcactggtcagttctagtggtcagaactgacccctcatcctcctcccaccttcggtggactcccgcaactccaccggtcctggaggcttttcctctgcagctgcggtctccaaagtgcggtttgagagctacgtgcattacctcatcacctccaggggccaccctctggcatgcatcgtgaatgcagattcctgggctcccctccagaatccatctcttgtgtgggctcatgaatgtgcattttaagcaggtgccccaggtgcctctgctgcacacttacctttgagatccactggattaaggctacacagacccaggtttctccttgtaattgtacccactgtccctcctggccttgcttagctactagtgtgagaactgaatcacccagatttaaaaaaagatccaaaagataagacagggcgctgtggcgagtcaccagagaccaccctgaggttaggtctgggcagggtcgttcacttccctctactatcaccctgctgctacggagttttctcagatgccttgcagaggagaagctagagtctaaagcaagccctgtctccagcagcctgcccagctcacagtaaagaaccagcgctggctgcaatcaccatttctcctttacaggtgcacagatggttggttccacgattcacctgggttttgctcactacagtgtagtttgccatctacatttcccttttatgagaatcaaaacaagggccgggtgtggtggctcacacctgtaatcccagcacttcaggaggctgaggcaggattgcttgagcccaggaagtcaagaccagcctgggtaacatggcgagacctcgtctctactaaaaaaaaaattttttttaaatagctgagtgtgatggtgtgtgcctgtggttccagcttctctggaggctgaggtgggagaatggcctgagctcaggaggtggaagtggcagtgagccatgactgcaccactgcactccagcctgggtgacagaatgaggccctgtttttttgtttgtttgtttgttttgttatttatttatttaagttaaagcgaaaattccccatttgggttttctttttctttcttttttttttttttttgagatggacttttgctcttgttgtccaggctggagtacaatggcgcaatcttggctcacggcaacctccgcctcccgggttcaagcgattctcctgcctcagcctcccgagtagctggaattacaggcatgcgccaccacgcccggctaattttgtgtttttagtaagacgaggtttctccacgttggtcaggttggtctcaaactccccacctcaggtgatctgcccacctcggcctcccaaagtgttgggattacaggcgtgaaccaccgcgcctggccctgtttgggttttctaacccctctcctctgctcatccattactcaagggagttctagggggtccagggcccagccacagggtcgtcagattcacgcagtcctcagcatgtgtcaggcatggcccctgccctctctgtgcccccagtacctgggcctggagacaaactcatccaacgggaaccagaggctctctgaccactgtgtcacttaccttgggctcagtcctgcctctcctctgctctagcctttcccatttaaagttctttcccccaaagccaggtgagagggaagcactgcccagttccccctgatgtctcttcacacctcaccatgtcccccggcaaggtgctgattctccccggttgtccttttccctctgaactgatctttctaggtaaaagctgctttttctgctcctaccccttcagcatttttcaagagcctcattctattccaagttttggtcttgggaacacttgtcttccggcaccaccacctggcttctgtattcaggcaggtgatgtgccttcacccagttgaggtaccccttctccccccaacagccagtgcaagacctttagacatccagcttcaccagtttatggggatgcctcgtccccgtcccgcttcttcatggagaccacttctgcaacatgtgctttctaaaatcctctcgggtcatcttccctcccgggagactctggacacaccatccacaatccactctcctgaagttgagggagcacgtccagctgtgcccggtgaccccagcctgtgctgctaacccttctcaggtgacacagctgctgtctctgaaggttcctgtcatttcctttcacccatcatcctcccctgctgattccaattatgtccagagaagcagaactttgttaccttcgtggcaaggcagaaacctcacacatgtccagctttcagctgggggaggcatggagcactgagctggtcccagagggcaccaccctgcacacctccctcttgcctggggatcagagccggccacctgctctcgccaggtccatgttcccgaggcccttcacattctgacgcccagatgtccagacaagtgtggaacctctcgactctacagaccccgctgactccacctccagggccattcccagggccaccctccctagcccccatgccctccttccttgctaagccctgcctgggtcaggtattgaaccatcaggagaagctgggctttccccagcccagagtgggggatgtggggatcatgacaaaatctatggcaattggagaaattcctttctccttgccagtgactgatttaggaatgggcagtgagataagaggtgtggtctgttggaggcttctgggaaagattctccagcttctaaaaacagctgtgtgaggccgggctcatgcctgtaatcccagcactttgggaggcctaggcagtcagatcacttgaggccaggagtttgagaccagcctggccaacacagtgaaacgccaactctaccaaaaattacaaaaattaaccaggcgtggtggcgtgcacctgtagtcccagctacctgggaggctgaggcaggaagatcgcttgaatcagggaggtggaggttgcagtgagccgagatcgcaccactgcactccagcctgggtgacagagcgagagactctatctcaaaaaaaaattaaataaataaataaaaacagctgtgtgaagccgggcttggtggctcatgcctgtaatcccagcactttgggaagcttaggtgggtggatcacctgaggtcaggagtttgagaccagcctgggcaatgtgacaaaaccccatctctatcaaaaatacaaaaaattagtgaggcttgatggcgccacctgcagtccagctacttggaaggctgaggcgggaggatggattgagcttggagaggttgaggctgcagggagcagagatcatgccactgcctgggtgacagagtaagaccctatctcaaaaataataataataagactgggctctgtggctcatgcctgtaatcccagcactttgggaggccgaggcgggcggatcatgaggtcaggagatcgagaccatcctggctaacagggtgaaaccctgtctctactaaaaatacgaaaaatgagccaggcgtggtggcgggcacctgtaatcccagctaatcaggagggtgaggcaggagaatggcgtgaacccaggaggcagagcttgcagtgagcagagatcgcaccactgcactccagcctgggcaacagagctagactccgtgtcaaaaaaaaaaaagaaagaaaaaaaaataaggccagtcacggtggttcacacctgtaatcccagcactttgggaggctgaggtgggtggatcacaaggtcgggagttcaaggccagcctggccaacatggtgaaaccccatctttactaaaaatacaaaaattagctgggggcagtggcaggcacctgtaatcccagctactcgggaggctgaggcaggagaactgcttgaacccaggaggcagaggttgcagtgacctgagattgtgccactgcactccagcctgggtgacagagcgagggtccatctcaaaataaataaataaataaataaaaataaaaataaaataggccgggtgtggtggctcacacctgtaatcccagcactgggaggctgaggtgggcgaatcacgaggtcaggagttcgagaccagcctgaccaacatggtgaaaccctgtctctactgaaaatacaaaaattagccaggcgtggttgtgggcacctgtaatcccagctactagggaggctgaggcaggagaatcacttgaacccaggaggcggaggttgcagtgagccaaagttgcgccactgcactccagcctgggtgacagagtgagactccgtctcaaaaaaaaaaaaaaaaataataataataataataaaataataaaaatgacagcgggaccaaatgcaaagaaacttgggtcctgatatcctcaagctgctaaattcaccaaccctggaatccccctgcttccagccttcttggttacaggatacctttccttattgtttatccattttgaatcagggttcctgttccttgcagctgaaagcattctcactgatacacgtgaggcccagtgttgctttattgatctattcgaccttcattttttgttaacgtatcaccttctagaattctcgtcacaagcgcgatctcatcgaggcttgctcacacccacgaggttatgctccctggcagggcaacagaatccagcactaagacagcagaatttgtagcaggcacactcgggtttaagtcccagctctgccactttttaaccgtgtgaccctaatcgcatatctctctgtgccttcatgtcctcacctgcaaacggataacaggccccacagcaccagatgcacatgacgagatgatgccaacagggtgtaagacccggcgcccaacaccctcagtacacatgcaacaaatggtagccattatagcgattgtcattttaacctttcagatttgctttggctgtttccacctggattgggcctgattggtggcaaactcattcgctcattcactcaacaaatatttactgagtgcctacgtatgccaagcactattctaggtgctgtggggatgcagctgtgacaacacagatttactttaaggtataaagttgtaaacttggtacctaacaggtatgctatctgtctttcacttgcctctccataccccggaaccaattatgggggggctcacgtatgttgcccaggctggtctcgaactcctggcctcgagtgatcctcctgtcttagcctcccaaagtggggattacaggcgtgagccactgcccctggcctcccagaactaatttctgccgtgctctgtaccctgagaggctgatcctggtcactcctttgctgactggactctggttgggtttggccagtggggtctgtggcagggtgagagagaggtaggtggggtgaagttccttccctgctctctccctcctgggagctgtgtcacaggcagcagctgtgccctccacagcacagctctgctgctcccgccctccgggactcgctaaacacctgccccactgcccttcccccagggagtcacagcctcctgctctgagatgtccatgggtacctcggcatcccttgttttctccctcaatcctctggtgtcgtcctttcattaaagtctcttcatctggggccggacgcaatggctcccagcactttgggaggctgaggcaggcggatcacttgaggtcaggagttcaagaccagcctggtcaacatggtgaaaccccacctctactgaaaatacaaaaattagccgggcgtgttgacacacacctgtaatcccagctactcaggaggctgaagcaggagaatcgcttgaacccgggaggcagaggttgccgtgagccgagatcacgccactggactccaacctgagcaacagagcgagactccatctcaaaaaaaaaaaaaaaaaaaaaaagtatcttcatttcagccatctgagaagataagcagttgttcagcaaatttcttagccctaatagaagagggggtgtccatagcttcaggtctacacaaagccttgatccttgcacgcctgggaacctggctcccgtccctccctgggatcttaagcacaacattcacgggcttctcctcagtcacttcctctgactactctgtggggtcaggcactgctgcaaggcacctccatcttagaactttcttactcccaatttctgtgtccctgatcccagcacttctagtcccctccatctcaacattatcaaagacagcttggactcactggatgaaggagaggccttgggcaccgcccccccaatccccacccccgccggccaccgtagagctcactgtggtgttccaagctctctcctgtacctggcattatgtgagctcaggaccaggctggatacttctgtccccattgtacagacgaagaaagggcctgagaagacagagggctttgaccaaggccacaggctgagctagtgtggatcgtgtcccaccagtgacccgcatggctggagcacaccgagggtgtgggtgcaggggcagggtgagctgaggctgctgtgaagggccctgggccgcacatgaaggatttgggttgatcatctgccaggggccggggcagggattttaagctggcaggggtgtgtgtgtgtgtgtgtgtgtgtgtgtgtgtgacacacacagagacaatcaaatctgcattttacaaagttccctccccacccccaggtcttgggaaatcagttagaggtgacagaagtcacaaggagatcttagaagaccgtgcatgttggtagtgagacatcgatggttttcccctgcttctctatactttactgttgaaaatttccacagggaggctggtggcggtggctcacacctgtaatcccagcagtttggaaggctgaggcgggtggatcacgaggtcaggagttcaagaccagtctggccaatatggtgaaaccccatctctactaaaaatgcaaaaatttagccaggcttggtggtgggcgcctgtaatcccagctactcgggaggctgagacaggagaatcccttgaacccaggaggcagaggttgcagtgagctgggatcgcaccattgcactccagcccgggtgacagtgtgagaccctgcctcaaaaaaataaaataaaataaaataaaataaaataaaataaaatttccactgtaaacatttattactttacaagaaagaagccatgtttataagaaaggctactggagcactggaagtgagacaggggcacggaggggcttgggaaggctgggggtgggcgacccttcctgagggagacagcagctggggcagcctcgtaccggctggggcagcgtggtcgggggagcattatgtctggacacacgcattcgaggagcctggggatgcccggggaagcgtgtgtgggtgactggagctcagaatggagacctgggtgggggcagggactaagcagtgcacctggtgcctgaggagaggaaggcatggtgtgaggagaagaggctgaggagtggggcacaggaagggaagaggcaggcaaaggagagtcgcccaggcagggtgcaatggctcacgcctgtaatcccagcactttgggaggctgaggtgggaggatcacctgagctcaggagtttgagaccagcctggccaacatggtgaaaccccgtctctactaaaaatacaaaaattagccagtgtggtaattagcctgtagtctcagctgctcgggaggctgaggcacgagaatcacttgaacccaggaggcggaggctgcagtgagctgagatcacaccactggactccagcctgggagacagagcaagactccgtctcaaaaaatagagggagtcacccagaaaggagcccagaggctccaggtggaggctggggagaggatgctgaggaacagagggtctgcacagccctatgcaggtgtggggggggtctacaaggccacatgctgcagagcagtgggggaggggggtgaaaagagcccatctcgatgtcactggagacccaggcaaccccggagatggggtggaggctgggccataaaggcatgaggctgacaccacagcggaggagctgggctctggggagggagggactagggtgggaaacagtgcaacatcattagagctgagggaaggggctgctggagaggctgaagcactttgtggtggggagggaggcagtctggacttgtgtcctgccccccacttgctagccgtgtggccttggattaagcctcagtttccgcccccgtcacatgggggtaatagaccttcctcagtgtggtgagtgtgagatgagataatgcgcatgcctggccccagcgaaagctctgtcagtgtcagctgctctgctgggcacccaggagggtccagcccggacaggacaaggggaactcatccctggcagtggcaggaaaaagatctggaggtggggctcgcagggtgtctgggggccatgaggaggcaggtgggagctgtggagaggctgcggggggctggagggctgctttttgagaaattctcctgggagccagtagggaggcagggccttgggtgcccagggctgtcccagggccagtgcagggaagggttccaagattcctaggtcccgatcctggctgtgatgccaccttgctgtgcacctttgggaagcccctctcctcctctgagctgccccctcatctgaaaaagagatggactcacccatctctaacctcttgcctctgagtctagaaccttctctaacgtcttgcctctgagtctagaaccttctttaagtgagagcatctggacatatcacagcccccaccctcacacccagaatgggcctgtcatacaggagctgctcataaatattaactaaatcaaacgagtgcactaagggtctctcacaacatctgggtccaggagccaccctgcagcctctgaccaggccacaagggcagtaaacacccacaggtgaggtatgtccactctccacacagcctccgcgcctgctcattagacctgaaagagattgcggcatccctgcaattcctgctgcacccctacccttcctgagggccaaagtgcctcgccctgtccccacccaaccttgcaaagacgggaggtgaccccactgaaacccaaacacaaggctgaaaagcagatgcaaagttggcttctcccttggctaggggtggcctaagagctaagagggagaccaggatgagagtggggccctgaatagcaggcggagccctgggaagagggagagggaagcggagagagaaacagagtggcaggaagcagagggccacaaaatcccccttctgcaccccagggtaggccaggcctgagaagggacccaggcgttggggctgctggagtcacaaactcgctcgctcgcccctcctccaggagccagcagtggcagctggagagtcttctctgtgtctgagtgagggaactcctgagaggggaggtgcctggttgagaactcatgtgctaatctagatccaaagctccgggatcgggaggaggagggagaagacggttcagggggtgggtggggcagtcctggcagggaaggtctgtctgggaagaggttgggaaagctggtcacgggagcaggggcaggagatgcccagtggggcaggggcccggcatgcagcagagtgggcctgggtggcccccacagtccccgccctcacctgctgctgggcctggatccgcatgtactcggccctctgcttgccatgtttgcttttgtcggggctgcccgcctggccctgggccgccttcagccgagaggcccccggagtcaccaccttcatgggtggtacactgcctccgccactctgcaggaagaggaacagggttgcagttgcagagtccacatggggtgaatcacacaggaaccctagcactgggtggggtctcggggctgggacctcctcagtggggccctttgagacctggagacccctctctagctccacacccgagtccagaacccaggtccaccctctcagtccccacttatggtctccctgcaggagaggggtggggcccaagccagtttcccaacggctcttgagggagagctcttcggtggcttccttgagtagctcaggggcagctgatgccctccttggggagcctctgctaaagtgagggtccccagcagcaaccccactcccggcaaggggcaccatctggacctgggtgcacatgccagcaaggggctctctataatggcacacagagcagaggggcagccccaggcccacatcctcctcctaaggggaggatgcaggtgaggtctccctagggatgggcaagcttggctcccatgaacctccccaagtaccaggcctgcccgcggggcactggggatccagaggcgcaagcagagagatgacagagacagagaatcagagacaggaaggggaggggagcatggggatggaaggtggggagagaactttatttgttggtttacagatacagagcagaagggggaggccctggttcttgccaaggctggggattggccggcccctgggtaggccggcttcccagcctcccccggactctgcctgcaaaccctgctctggcaccaggctcccaggagagtggtaagagctgagagaaggccggtgggaggagggggctggcctggcatttctgctgccccctactctgtctgactctggaaatggaggaggaaggcagcagaggaggatgaaaagcgggcagccacctgggggcggaggggtaggggtggggggctgccaggggaccccatggcagggcctgtgcccatgttgctcagggtggcttccagctcccggagcgtctcctccaagctgtccatctgctgggcagtggcgccccacgtggtgcggcctgagttggcagcagcctggccctgatgctccctactgcaggtttgggcatcatgtccagagtccttgaggatctcctctgggtaggtgtcagcagtagaggtctctggagtcccatcctgggctggtccctgaggacactgtactctggctcctccatcctctaggctgctgcctcctccacccagtctcttcagagctgccccctccttccggggcatgaagctgctcctcggcccagaagtctcccccactacccctggtggggactgtgggccatcccagcccctcgtgctgtcagccagggtctgaggtcttggggtgggagctgtcctgggtcccagttcctcaagtctggcctctggcggggagggagggttgggggcacactctgtcaagatgatccttgggacgcagaaggccctgggacctggggcagcctgccgggagaaggaagatgaggaagagtgtgattcctacaaccaaaccccaagctaaaatgggtgttacagttaggtgagcctagcccctttcttttacagatgggaaaactgaggcagggagggtcctgacagaggctacccagtaagttggaggcaaaattgggaccagaattcaggtctttcccaccataccctgtggcctcctacttgccagtaaaggtgccggtttggccagggcaggcacacatttactttacaccacccatgtgagcctctgggagccgggctcagggttgttcccatgagcgtgcccatctgtgcaatgactcgacaccaaggtggggccggtggaggatgaagtgagctcgctgggcatgttgtgagtgcttcataaatattagctatttgttgaaatgaatggaatggccgagacctttggccccatgtgggcagagacaacatgtcagcctctggcatctcaaaccagagacttctggtctaccccaactttgtgtgctctccccaagagcttcacagctagaaggggtggggcttgccccctgacaaatcctctgtggcacacacactcgggcaaagctcccttgggcacctgctccggtgccagcatccctggccctggcctcggtgagggcacagagggaagccccaagtaccactccccgatgtgagtgaatcctggtctaactctgagcaccaggcttgtgccaggtgccgtcacacccttcctcaccttcagtgcctaccttaacccgggaagtgactgctgctctcaccagggcgagggaggtaacacacttcacccaaggccacccacccacagctagttagtggcagagcctggatttgaacccaggtagtctgactccaaggccagtgctccttccactaaagggagccgtggggagatgggagggggcagcagggacccccaaccaccccctcccaaaggaacccacccagccttgccacctgcttacctggaagtggggggtgctgactgggaaggcagagagggcaacctcacgctcgcccggctccgttgcccgatgctgccgcaggatgcagagggtcggccaggggcaaaaggccttgtccactgggcccctcaggatgggctcccagagccggaaaggggcagggcttggatgggaggggccaaagtgccaagggcatggccagcccaggaggcgccccttccatacagctcatcctagaggttcctcgcactgctctgtgcccatcctctgcccagcagaaggcactgtccactatctgatgcccctctgctcctcccccgccaggaaaccaaagcgccaacaggcctccagccaggccagaaatcaggtggccaccagcacagagcccactgtgggccagggagccccagatagggagtgtgtgcacacgggaggctctccttctccagagcggagcccccctgcctcaacctgacctggcagagagagagagattcccagaccttccccctcccctcctccccaagcacagtccccaggggtagggtgcagacagcaggttcacccccaaattcccaggaaagaataaagaggaaataagtgcagcaggacagcagcaaggactgacattagagagaaggaagaatttcccaatgccaaaagaaccagcagccaaggaatggcatagctttcttccattccaggctctctgtccaagagggcatcgtaggcccttgggctagtgaggctgtagacgagcctacccctgtggtgtcctggcccccagcgcaaggcatagattctaggggaaaaacagagcccctccccggcacaggcagcagagcagcgaagatggaggtgggggctaggcaagggctcaggacaaggtcagattttgagctggatccaaagtcatcttgtgagcaagatccaaactccaatcttggccacactcagccttcgggccagacctaagctcaaactgcgaaccagaacaaaatactcaggcctccatcagcaagcccgtgagaaaatgcagacacaaggggccaccagacacccaggctgctggagtctcagggagccccccagcaagcagcggggaggaagggttatgcgcctgtccttggagtgggggaggggtgagtccacatgtaatgctgtggcagtggctgtggccatggtgggacttgggatggtgactggcgttttagcgggttagcgtgggaggtgaggagaggaagctgtgggggcacaggcagagagagagctgtgagaagtggcagcagccccgttaccttccgtgtagggcctggggctgagcccccggggggccccaggtcctggggggacagcaaggtggggatcagctggcggcggggcgtgggggggagggaagacactgagcttctctcaaacacctggggagcagaaggtgggggcaggtttggaggagggggcactagggaggatgggggtgctggcctgtggccccggcacccttggggagggtggcctgggatggcatcggcccccagcctcaccccttggtcccttgccatagccgccagccctctctgccctcatctggtcacctcagagccctggtagtccaggtctcccgcactggagctgggggtggctgagaacgcttgagtgtggtgactgacactgctgggagagtcgaggcatggggtatgagagtctcagagctccgtcctcagaatactcaagtatgggggtctcaagcatgagctgatctcagaacactgggggatggggatctccaaactcggtgatctcagaatcttcggatacgggactttcagagtgcaggaggtctggggatacttggggggactcagagactatagttaaaaaactcaaacctgcaaggagagaagactttagacccccacccctcatttcacagtggagaagaaatggaggcaaaaggctggggtctgaacagccagcgctccgcagggagcccgagagcccatcttctgcctcatcctgtcacctggcctggggggcagcctgggagggaagggggcctggctgagaccttgggggccaggtgtgccctgacctacctctagctctgcgatgatgcgatcctcgtcatcctcgtccttgatggccgaggccatgatgggtggtgtggaggctgggcgggccacctcagacacagcccggcgcagcttcacctggggcttctgcacctccagctcctcggactcagccttctgcaaggcccgggactcctgtcaaggccaggctctgccccacttcagcaccagctcacctcccaggccccatcgcccatgtaccccagcttctcgtctgctacttctgctgctacacccctgccagggtgtccctcaacagacaggggcctggcatggaattaaggcaaatacacatacctagaatcccaaactagcaggacaaagtcgccaccggccactccctctttccttccatgttctctgagaaaggggtctctttcccaccccagagggcctccagaagtcatctgaggcttcatcctaactcagtcccctggccctctgtctgaggtgggagtggtaccttgatgaaggccgagtccttcttgctggtgaccaccacctctccggtacgtgtggtggtcaggccatgggaggaggggaagctccggcggggagggggcggtgggggcgacttggagggcttctctgtgcggtatcggggcacggtcaactcatctgcaggcaccaaggggctgggggtcagcaggcctgcaaccttggagtcagtgcactacatctaacttgaaggggataaaccttgcttcttcctccagggaggaccaggaggaggtgagaggaaagcctgggggcaagaacacagggcccctccttctcttacctctcctgcacacaagccccaagccctgtccctctcctgacagcactcttgctactccaagtgttgtctgtggaccagcagcactggcagcgcctggcagcttgtcagaactgcagctcaggccccacctctgggctgctaaaccaggatctggttgaacagatcctgaggtgacggacacacattcaagttagagaggcgctgctctaaccacctccttcccactgcccctcacccttgcctcggctcagctctccatctctcctccagggatcctggcccctcccactgggctctcctctcccccaatttgtcctccagccctgcttccggggtaacctgcagagaggtcactctagccattcccctgcctttgatcttgcagtggctccccatcaccccaaaccatgtccaagctccttaggccagcacctctgcacctgccaagctttcagcctcagctctgcttgctgctccccaggctggaccctgttcaggccatgccacacacacaccttcaggcgtttgcacacgctgttccctcaccctggagtacccgctctcactagctagggaagtgcccactcatttgcaagatttcagtgaaaagtcacatctttagggaagccttcctgccctcctagggcctccgccaggactgcacagtaccggcattcacctctgctattacatttagcacttgcattctatttctggtttacatactaggcatggtccggcacagatttcttaatcattttgagcctatgtccttctctgtaaaatgggaataactaccgtgtctgcctcctgagcttgttatacaattataaggatgaggccaggcgtggtggctcaagtctgtaatcccagcactttgggaggccaaggtgggcggatcacgaggtcaggagatcgagaccatcctggctaacacggtgagaccccatctctactaaaaatacaaaaaaattagccgggcgtggtgcaggcgcctgtagtcccagctactcgggaggctgaggcaggagaatggcgagaacccaggaggcggagcttgtagtgagccaagatagcgccactgcactccagcctgggcgacagagacagaccccgtctcaaaaacaataaataaataaaaaataaaaataaaattataaggatgactacagtaaaagcaatggaacagttcttatcacagagtaagtgcttgataaacacaaatgtcagtgttattccccccactaaattttgagctcttttaaagcaagccctgtcttatttccgtatctccagcacctagcacacagtaggtacttaaccaatatgcattgcaggaatgaataaaatgaaggaatgatgactgccacttctggtctggatttctgccactcccgggaccgtgactcaggctggggaccatgggaactgtgtcagtatcagcagtatcagcgctcaacccgccctcaacacagcctggtttggggcatgtgcccagccaagccgtggaggcggatgactctgcctggacttgctccctgcctggtcctctcagtggctcccttcccaggacagtgggaaatgccgggatggagtccagcttgccctgtccttctgggtcccagtctccctttagtggcagccgatgtcccagggcctcccttgtgtggcagcccaaccacaatgatcttgagatcccagtgcctcccccatcagcctgggctcctgaggagggcactcccccacgctgggctccttaccagccctactactccccatacctgagcccctcctcccactgggctccgttcggggggctgccttctggccgtggggggccttggggggcttgtgatctggagtgggggccgggcctggatgggccttgctggcacagtccaggtcagggatggccttgagcagctctgcctgtgtctcttccagcagccggttgatgtccttggcactgtactgggtcagggctgcccgcttctcctcccagtctcgctctgcagccttaacagggagccaggagtcaggattgaggtagctctcctgctccaggacctctggggcctcagcctcctcccccaagccacgtaggcaaggaatagaaaacgaagcctcatatttgatcccacctccaggaagacactttgacttctcgtgggtatcacatggcatccccatgggtaggaatgccaccctcattatatactacattcgtgataaacttagatctatttctgggcattctattgtttcactgactacatagtctattcttgggcaaacatcatactgctttgattattgtagctttataatacgctttctgtctaggagggctaatgtcaccctcattatgcttcttaggcttccattagggcactggccctcctcccccaaggaaaaagacccacaggattggcactccccactctaggaaggatggtcgtaagaatgtgtgaacctggctcatggccccacccacaatccctggccccagcacctcaacagacacagctttgtccacgcttctcttgccaggagtgtccaggcctttggtggggttgccccccttgggggtaagagaggctccttcagctggcccgctcagctcatgcaggttcagcggggggctggggggtggcatttcgaagtccacgctcttgttgaagtcagtctctgccgtcaccttcttgggggactgactcaggagattgttggggggtggccacacaccctcatccacttgcctggggttgggagagttgggagcagctgtgaggccagcaggtggtgacccttctgcaggaaggctgctctgagggaggtggggtgggaggcaggctctgggatgctgtgggagggcctggggaggagtgactgcccctggtataagaggaagccaggtctacagcatgcaggggtcacagggcagagctgaggtgccagtccagtcggcacgccagtgacctttgggggagttggggtaagggttcagtatgacctatgggtctgggcccggtgtgtgaacccatgggaaatcagaggtcagggacagaatgaccttcggatctgggccagcgtgtccgtgaccccgcggcagcgcttgaggagcccatccaggcgctggggctcctccttcaggaacttcaccgcctccacctccacgcgcagcaccacccgcatcttgctctgcaggcccgggaagtgagctgaggagacaggaaggcatgagctggggccagagggagcaccacagactgggaggagaggatggtggctggagtatggcagacttccccaccctgaacaacgtgctgcattcgcaggccccagacccacccttgagctctgtcagcgtctccccgagctgcttcagcaccagtgccttctcctccagctcagggccgggcaccagccggtggttgtgggacacgtctctctggatcttctccaccgatttctccaggtcactgcagccacagagagaccctttcagcccttttggcctgagatgccagcccagccccctgaaattgggcaactggaaagaaatcaggccaccagttggatcgaaagtaaaagcaggaggctgggcaccgtggctcacgcccgtaatctcagtactttgggaggctgaggcaggcggatcacttgagcccaggagttcaagaccatcctgggcaacatagggagacctcatcactacaaaaaaataaaataattagctggatgtagtggcaggtgcctgtagtcccagctactcgggaggctaaggcagggggaatcacttgagcccaggaggttgaggctgcagtgagccgtgattgtgccactgcactctagcctgagtgacagagggagaccttgtctcaaaagcatacaaacataaaagccagccatcaggccacatactcaagtaaaatctgcaacgccaaatctcagagatgaggagacttcagaagcgctccctaagaggtgccctgcaccatctgcccccttggaagctctgaccctcagcaatatctgcccgagtatctctcattgtaacttgcatcccctgattctattctgccaaggaagcagagagaacttagttgcctttcaaagaaccagaggcagagcacgtgcccccggggaggtctcttgtctcgggggaaactgccatgtccattgcccttctctcacatgatccagccacacagcctctttcctgagggccaaagctgagttagattttcagctactatatgctgaacttgtgtcatttgagaccctacattcttctaaattgtaaatcagatcaggtcttcacttgtgccattgaacgctaaatggatcccatcatcctgaggcctaacatccaaacttttcaatgcagccaagaagggcaggaaggtggtagttgaaaacttggttctagagtcagactgatccaagctccaatcctcactctgcccttgccagaggagagatcttgggcaagttacctaatatctctggacttcaacctcctcgtccaaaaaatagggatggtaagagctccccgctaggcatggtggttcaagcctataacctcagcactttgggaggccgaggtgggctgatcacctgaggtcaggggttcgagaccaactggccaatatggcgaaaccctgtctttactaaatatacaaaaatttgctggccatggtggcgtgcggctgtaatcccagctacttgggaggctgaggcaggagaatcgcttgaacccaggaggcggaggttgcagtgggccgagatcatgccactgcactccagcctggggaacagagtgggactctgtctcaaaaaaaaaaaaaagagttcccccttcatgggggccatcaggtggattggatgagctaatgaagacaggaaagcacgcggcaaagggctcagtgcctgggaactgctcttgttttccgtgctgctgtaaccctcatctcatctggcttctgcttagagcccttcagacctgctctgaggtgctacatgtgctgtcctctctggctctttataatgctgttttctctgcctagaatattccattcacccatacacatacaggcacacacacgtgctaactcccactgatcctcaggtctcagtgggaagctgtcctccagcccctccccttgcggctgttgggtctgcttcctgccctccaaaccgctgaagctcctgttggctgggttgtgcagccttctggactactaaccccaggcaggcaaagaccatgtcttccagattcatctccggtttctagcacctggcatggtgcctggtgcagagtagatgtctgggaaataattgtggaatgaatgaacaagggagagaaggaactgctgcccaggtaagtcatctcagttctgtacttgagtcgctgacatccctgactcacatgcgggactttatatatattcctgtcaaatcccattgttggatttcagctcaatccaggggcaaacaacttttgaatttcagttctaccatccaacagatttgctcccccttaaagctctgtgtcatcagcaaatcttatcagcacgccttacacatcttcatccaactagcaggtgaaaagacagactgggttgaagtcaagggcaaaagcttgtgactcagcaacactaccagttaaagagctatcctgtattacgcacttactgtatgccaggtgccacactcaggccttggctttcattactttaattaaccctcaaaacaaatcctggaggtgggaacagttattatctccagcttatacacagacaaacagtggctcagagcctagactacacatcccagcctcccttgcaatgataagtggccatttaactgaagtctacccaatggaagatgagtggaagggatacatgctgcttccagacctggctcacaaaaacctcccatgtaaggtcctccatgctcctttctccttttccattggttggaaactctctgggtgatcttggaaaacacatgttgaagacggcagaacctccatcagcctgggtccctgaatgactgcatggagaagagccacccgcctaacccacccaatactgttccatgagaaagatatgtttattacttttgaattattaaacaatttgggagcttatttgttataggaagctaccctaattaattagctatcctaagactctggcattttaaaaaaaggaaaaaaagatattcagatattcaaagagattaactagttagttcaaggtcatacagctattttgcagcaaagcgggatctactcacatctgacatcagccattggttctgctgcatctcattttcacactagaccaacatcagccacgctgcccccaatccatacactgtcctagcccagccctcgctctaccacatgggaaagaacaattcccctgctcatatgtgtaacacctgactggtccaggctgtgccagttttataaaatggtcactcccaaacatcactcagagggggaagagactctcatgtaaaggactcaaataagcttccaggagatgacaacactgcaattcttaggcaggagagactaggcctccctaagctcaatcggcaacttgatgttctgatcacccaatctgccaaagttggggggcctctaacctgggcaagctctgcaaatgagtcccaggccagctagtctagacactggattaaaatgtggctaggctttccaagcccaggtttagtcctggaggggtcaagaggggagagtcaaaatggaaccagctaaataatttatggggcccaatgcaaaatgaaaatgttacctctagtttaaaaattattaagaatttcaagatggcaacagcagagcattacaccaagcatggggcccttccaagcatggggctccgcgtgaccgcacacgtggcatacctacaaagctggacctgggttaggcaaaggtagattccaggacctaaaaggtctcagtcagcagaggctgcacctaaaggcagtgcccagacagaccttaagtgctgggctagatgggcaggtgagtgagtcaagttgaatgaaacagaaccagttttaacttccagcaagttgccaggaaagaggaagtggtatagcaaattggagcaagagtaagcgtaagctcctggagtaaccacgagctacagccagagtgtggggcaggggggctgcagggttaaagcctgggaaggctatgggagctgggcagggagggccttcatggccaggttggagcccagtatctgcccaacccagaagaagcaggagtcccctttcaggaggatggagaatcctgccagaaacagtaatgcaggtcccaagctctctgagtaatgggtttgataatggggcaggggttggggagtctgtgttcctggagaaccaaggccttcagggagccaaggaccaaacacttataatgacggtagcataaatctctcctttcgtatcttctggctctgtgcttttagatctcctttaattttcctttaatgtctcggtaaagttgcttttgaaaattccaacccccctcctctgggctgaatgaaaagggacaaggaaaggatagaaaatctggagaaatggaattccctgggtgaggagagatgacacctgccagtctgcttggagatctggctggagtcctcactaagttatcacacctagagtgatggggtggccccttaccctatttcagccacatggtgtcatgggaattgttgccttgggccttgctaaaatgcacatgtaccaccaggctatgtgggcctcaggctgaggagcagcaacccatctcaaggagcccgtcgcaagaggctcatttatgacttagtgaggaagctgggctccaaggagcagcctctcctggctcccggagtcactggccagtacaactcaaccccttgttgaaaagagaggtgaaaaacttaatgctgggtacagatgaggacactggggcacagagaggggcaggaactgccctgatcactcagcctctcagtgctggcactggactccaggtcccctagtgccctgtgtcaccaagagagggcccaaaggaaggagcagggcctctgtctcagatccttatcactggcgagggaaagcagggtgggtgctcactccctgaatggacactgaaaggcagcgtctcccttcaaaggtgccagacaatggaatggttggccagacagccatttgctaaatttggatcagaagactgtcttctgttaacccctccatgcctaagcatgcggaggcacagtgttcgcgattcctccttccttctgaaaacactacagccctgttccagctgcactaggaaggaaggtgggttttccttggctatatctggactcagagatcagggaatcggatctccaatgatggctggtcagcgccaggctggagcagtgacggcacctgaacgctgcacctgaactcactacccaagggtcactttgcacgggtcacaggccaaaatgaaagtaggcagagggcagagggaaatcaggcagctggccacatgacagtgaagctgcaggccacaggaagcctgagtgtggatcattatgaagcaagaccatagcaaaagcaggcatcaagccagaaaaaagaaatcaggaataatgccagccggtcaaaagtttgtgggtcacagtgaaatcaggccagaggagaatgaaatcaggcttcagaacagaccaacgccacctgtgactcagagggaagggagctgcgcctcccagggaaaccaggttgcgggtcactccagccgcacccccacccctccctccgccgcgggcccagcctcacttgagctgctgggtaataagctcctcgtcgttgagatagcgcagccgttcctcttccaccagggtgcgctgccgctgcagcgggtcctcctgccgccgcgccgcctccgacacgcgcatgctcagctctgcctccgtgcgcttcagcagcgcgcgcaccgactcctggttctgtagctgcgggacgcacggacggatggacccgggtggggggagcggagccgcgaggcaggggaagggccgggagaaggcgggtagaggactgcccaatccagggcggggctctgcagaagaagcggctgcttggctccgcctcaggcagcagcgaaggggtgggatggcgaagggcaggggcgggatggcgaagggcaggggcagagggctaagttctggggaagaacagaggcaggaggagaacggatggggatcgtggagaggggagcgttaaaatgggccatgcaaagggggagctgcatggctgtggccgcgagcaggggtggtattgcagggggaggagggcaaggttaagttctggggaatatgaggcaggagaaggggttgggaatatttgcgggacagggtgtagccctatgtaggtccctgccgacagtgcggccgcatggctatggcttccatcatcccggaatggggacgggactggaatgaaggactcaagcgctggcatttgatagagcttctatggctgggacaggaagactaagttgatgatcgatccaaccctgttccaagcctgaatggcgggggtgggcaagatcttacccgttgcccagatggcaattctctgccccctccccagcctgtctctgctaattatcctcacctgacggcccctgggcctgcttgaggagcggactcggcgatgccaagctcctgacaggtgggaccatctgccaagcagggccggggagactgttggggctcaggagggaggagctgagaggacttgggggaagggctctcgctgactcagggaaagggatgcagggcaggaaggaactggaactgccccgagggatactgacgacggaggggctcagtgggtgactggggctccaggagggcgatggggactcagggaaggagaaggagggctcaatgagggggtcacgggcgagggataaggccttggtgaggaagtggaggttcagcgagggagcggaagctcaagaaaggggaaggggagaaagggttcggagagaggccagtgagcggcgaaggactcgggcgtggaagctctgggaaaaggatgaggtagtaggggatggggcgggacttgcggcaagggacttctaccagtaggtgggcgttggtggggcggggcccaggacggggcggtacctggagcttgcgcaactgctggagctggccgcgcaagtcactggcgctgttctgcaggcctcgcaggtgaagctgcatctgcagccggctaacggcggtaggctgacctgcgggggtgctgctggccgagggcgggggcgggccggacaccggggtggccccgctgctccggccgcctgacccacaggctgcagaggaccacgaggatgggagaaagtgaacaaactgtgagcctgggaaggactgggctgggacaaagtcctccctactctccgaccccacacagtagccagagaagcccgtggctctacctgccccaagtggtcagccctaacggtggggaccaaagtgccaggaaaaagacctcttgggctaaggccagtgatgtagctattgcttaatccccactttatagattagaaaacaggctcggagagaacaaggatgggggagggggaggttcactcacgtgctgagggggtggctgctccattggagccttcaatcttctcgctgtggcacagggaaaaaagccatcagggggtccaggccagccccagaccttcagagctgggtggaaccttggatgtcatctcctccagctctccgatctcaggatggagtcccagagaagggaagggattcacccagggtcacccagtgagacactggcagagccgatgcccatttccccttcctcctgctccacccctaggccctggcagtggtgttgggagaggggcctcacctgggggtctcaggctcagagcctcgcagtaaggcgctctgcaccaggcctgtgaggctggcaatctgcttctccatggcctccatgcgctccctggggaggaagggggtctgggcaacctcgcctctgagcatagggtctctcctgcccagccccccattcctaagattggtaaccagaagaaacaccgtcccatccctggctgccaaaacacagacaacgcaaagggccccaatgcctaaggatcaagcccacagcctcccatctcacctttcattccctccctaaaggctgcacgctgatctctccatgcctggcaatgctttcccctgcctgctctgcctttctcctgacccctcccccaaaccattccacagaccccaggggccccgaggaacgcctccttccataccacccaagggaagtggaggtatgctgagtgtctccccactagaccaggacaggaactgggtttgctcagcttggcattgacagtaccctgtgcagcgcctgccacacaggccacgtaagagctgtgtgaaggccaatggcttctcttcactgctcagcagcgctgcctgagggtgcagattacctactgccctggttacctcctccagccctgcacccttaggaggggactgagcgatgggcaggggctcctcagcctggaggctaggtacccgaatgtgctcctttcctcgtcaccatttttcaacagcaccctcctccccagtggacttcagctgtcccggtgctggacagctctcactgctgcaaactcttaagctggaaagccactaaaagtggttcaacccctcaattttacagttggggaaaccgaggcttagaaaatggatgcaaacccaagtctccagagtcctcgtctggggacctctcaaccaccccctccagtcttgcggatgggaggaaaatggcaagctggtctctccaatgccctctctgccacatccaagatgctctctggcgacccttcaagactactcaaggtctccaaaggactccaggatctcagtccaggacacacacctgccacggactctgctgtgaaccctctccgcagcgcaccccccacccccagtccctgaggcctggttaacgtccctcacctggtctccgtgtccttggctggcactggcggcccgaacccaaccagcgagcgttccccaggcccagggaagagctccgaagggggagctccggccgtcgaggcgctccccgcgctgcgggtcttccctccaggactctcggcaaagacggacgaggagcccgagtccttgcggaaggactggcgcactggcgagccgcggctgggcggccccgagtaggggctgtgcggtggcgggggacctccggggggtgctgccacgtcggccagcttctgcggtgacgaaggcggcaggcggaagccgtagccgtcgccgtacagcgggccgccgccgcccgccgccttgtacagggagtcctccagatcggactgcagcgcggcggccgagtaggtgctgagcgagcgcaccgagccgcgcttgtagaggccgccggcgcccgggtaggcgaacgggtcgccggcggccgcggccaggctcagacggccctcgtgcagcagcccgtaggggtcagcatagaggccctcgcctttcaccagcaccatgccgcccgccttgctcgccaggtcctcgtccggcttcacgtcgcgccgctccaggatggcgctggggctggggctgacgccctgggcggccggggcgcctcccagcctctcggccgcgtggtgcaccgggctgccggcgtacgaaggcgggcgccccccggcgtacgataggcgcgaacgcgacggcgaaccggactgcagcccggacggcagccccgacggcagcccgggcggcggcgagccggatgccaggtgcggcgctggtgacaggttgttgaggcgccgcgtgggcgaggactcccgcgatgcgtacaccatctctctctgcgcagaagacagcccggaaccccacggggctggtcaccaaggacacccctgtcccttgcttgaggagccagcatctcctccctgacgcttaggaagtcccttctgctctctgccctccctccatcctgctgcgtctagggtccctttcccatcagggttcctagcatggaggaaaaggtggccgatgaagaggcaccagaggggtaaccctcagctcagctaccgtgaggggtgggaagtagaaggggaaggggtggctccggctcctgagagagggcttagaatatctggaggcaagttagcaaaatcccgagtggacaggcccggaatggaggggaaagtggcaggtgggacaggggctcttccctaacccctcagcccctatgctgtcttctccaaagctggccctggttccagatgacaactgcccagaccctgctcccctggaccccatgtgcccagcctccccaatgccctgggcatgcccagccatacccggaggtccccgttggtgagatgtgagccagggaaggcagcgtagaggggctcctttctgtagatcttgataatactgcggtcctggatgtccctgggagaggcggggagacgggggtcaccacccatcccccagctgtgcacaatgagaagggatggctactccaggcctagagaagaggggtggccagaggcaccgggagccccatctcaggctgcctgcacacacgcccagcagcctccaccccggcctcttcctggcctccggcgccattttcaggttagctcaaagcaaagggaaccagcaggggtggacgatttagggggtgggggctgagatggccgaggaagggggcggggcggtagggctctgggaggggaggggaaaggctgaggtcgggtcaggaaggagctggggaagggccggcggggtccagcaccctgcagaggaggagcgtggggaagcccacccaaatcccccccggtccacgcccaccggacgtcctccagctcgtagaagacgttgcgagcctcgtctttgatgaggatggcggtattgggcgacttaagcatgcccatggtgagcttctgcgggaacatgtgcgcgatgagtgcgtgcagcgtgtccaggctgctgacctcgtgcgtgatgtgcacgcgccgagtctcctccccgaactgcaggaacagcacccctgcgaaggagacgccgccctcgctgtcactgctgccgtctccacgccgccctccaggagagcgcggggagcttttcggagctgcgccagccccgcagcggcagggtctgaggctagacgccgcccccgagtgcagatgcacccaggcacctctcatgctgccggcgggggcgccaggccggctctccagcctctcaaggcacccactggactccaggcagttgaaggaacttggacaaggaaatggaagtgggggcagagcaggtggggcggaaactgaggggaagtgagctgagggagagagaggttggagagagttagagaagggagatgggagagaagggagggatgaaagaaagggacagaaaaggaagcaagagggagagaggaggcttggagggaaaggggtcgggtggggatgctgagggcgagagagagatggagagagctggggttgcttggggagaaggggctgtgggaaagagagcagagcttgaggcgagctggcgtgctgtaggggaggagggggctccagggagtgaagagcagagggaggagcctgtgtggggagggagggtggactgggcgggcagtacctggggagcgcagcttggtctggctggccgagcgggagagaggcaggctctgtcggaagcggttcatcctgctgaagcccaggggcagctcggcctccgacatggtctccagcgactcggcggaggcgtaggacagctttgccgcctggtctgccagcccgggctgggctccctgagtgtggcgtgagctgcgggtctgcaggggccgggcagggtgagaggaaccaaggatgagcaccccccctcccctttgcttgtcactgcccatatccaggcctgggaaggtcctgccagccagcgacacccacacagattacagactcccacacagattacagactcctggcatggccacaagagagttccccagtctctgctggccttggcctccctgggacacccggcaggtaaggaatgggcaaaggacccaggcaccctgggaagccagacaagaggccatgtgagtgggagccatgggcacggctgctatttcaggcttccgaagaacaacacaaatttgtcaccgaggtgagcagcagaatcgttgagcaaattggggcattagttccagacattaattaagtggcaggtttgtgagcggagaatttattcttcatggagttcagagggtgggggtgggggtgggggcgggaagcagggcccagggagaaagcaaagagagctggcaccccaggatcccagctttgaggggatgcggaccctgacagagctggacacagggaatgtgcctgatttagggtgattgagaaaactatcccgaactcctcaaagccagctggacccggatttgagacgacctgcccagtgcccacaacacacatgttaagtctgatgtgacacacatgtgccaggcctcagcccctccttgcaaggcacatgctgccacacagccagccagcctcccccaggagcctctgagtgacggcagccacttctctgaagctgtagctgaggctgatatctggctgggggtgggggaggatgtcacaggacagcttgatggctctctccgtgggggagggggagtcaggatgatttcaaccgtactttaagagcctacttttggctgaaacctggggatgtcactcagggccacagcccctgacattctgccttagtccctgggcaagaaatctggttgttgtacagaagctggtacaaggagtgagataatgaatccgatctacatcattccatgttatgtgcattatatacatatatgtattacatatacatatactgtcaagaaataatcatgttgcccaattatatttttttgtaaaacaaattgtctatttttaacaacaaatcactcaaaaccattaacactggttatctcagggttgacagttttcttttttcactttatagatttctctacaaaacggtgtgaatagattccttttataatttaaaaaaagacaacaataaaatatctctaaaaaggaatcatttattctcctcttcagctccctctctccccaattcctgatttacccctaattaatctccatcttcatattaactcaatttaatgttccaattggattagcactcttaaagggagagcatcttcttctgatgggcagtatgcccagctgtccccaaggtggccttgagggtttggggaccataatagatcagacgtggggacatcagggagcttcccctctcaagcataatgccttgaccactgggtgggtgtgggtcttggcaggaggaaggcagcatagaaatgggccaggggcagtagggaggggccgcttgtgcttgtgaccgagaggctatggctcagctctaggctgaccaccagtgccagcccacacccctctgtctcaccttcatcccagctgaagggcggggagctctgtggcagtgtggggaaccaggtctggtctggtggtcatggggttgcctggcaactaaaaggtcagtggttgccaggctagtgcggatgagggctacagaattcaggcagcacgaggcagccagcaacgatgaagagtagggggtggccatggtgccggggggacaccagtgagatgccagtaaggaggcagaacaggggtccaaatgaagggaggcagggcagggatcctgggggttgctgcctgccaagaaggcagaaaccctgggagaagagatgcccacgttccctgctccaccacttcctagcccagtgggcacctttccattctcacagcctgtacagaaaaccctctcgagaggagggaaaacctgctggcacttctctccatgcttgggctgagacaatagggcagaggaaagtgaaacatccaggacttccccaccataagggagatggcagaagaacaaaacagtgattcaagcagagctctcccaagacaggagagggaccaccatgggaggtagagagcgcctatcaccagagtgttccagggagcagctcatggatctgagattcccagaggttgtccatagactagggaagaatcacttgggagcttttaaaaatacctttccaggaccccatattcactgaaccagaatctctggggattggagcctggggttcgagatttttgacaagttcctaaggcgattctgatttctaggtttgagaatcaaggcagagtctatgatttagtagctaatgaggtcagctaccatgtaaggctcaccaggagccaggcactgcctggaacatgcatcctctcgtgttttgttttgttttgttttgtttcgtttccttccttccttccttccttccttccttccttctttccttccttccttccttctttctttccttctttctctctctctttctctctttctttcttcttttttttctgagatagggcctccctctgtcacccaggctggagcgcagaggtgcaaacatagctcactgcagcctcaatctcccatactcaagtgatcctcccacctcagcctccctccttggccaacaagttctcactacattgcccaggctggtttcaaactcctgggctcaagcattccatatgcctcggcctccgaaagtgctgggattacaggcgtgagccagcacatccggccttttttccctatctttacaacaattctatgatgcagacattgtcgttctactctacagaggagaaaccaaggctaagaggatatgtggcttgccccaggtcaccaagctagttagcagcagactgtatggaattcaccactacgcagcctggctcttgggtccatgcgcttaaccactaccctcaactgcctcctccaaagaggctatgcttgacagtgtgactttgactccatgattctctgattcaaggacttcttgcagtgctaggaagaatgcatgcaaataagacacctggggagtctgggtgggatgcctcccacccgctgtcatgatgcctgggacttgggaggccagagactccaggaggcaagcaggtgcctgagggtgctctcccaggggtcaacaggataccctgggaggggcagacagctgtcttagctctggaaaggccagagctcaggaggaggcaagaaggcacctatccctcagcttagccctccacttagacaacaggcttgagggtgtaggaccatgagtctcctgcctagcacggaccagcccccatggtggacagtaagaaaaggaagggggacccatcacagtcacagggcctccctgggaggtgagatatgaattcaaagaagagggcccacaacaagggtctaagtccctaactcagaggcagcagtctctccaggctggggaaaatgtatgtcatttcaaaatgcccctcaggggctggggatgcctggggactgagcatctctagcccagatccccagcaggggtggcccaaactcctactccatccacaagcccctgacaggcgaacccagactctcccaaagcagcagccacagcctgcagccccgaggcccaccgcccataccagaaggtgtccgtgcagatgcgcaccccggtgcaaagcctgtgcaagggagaggcaggggcaggggagggagagcacatgcagttgtcatgggagcagaggcatcacacactgaccttgaaactccagtagtttggctgctgatggaaataagagaagagatggttatgagggggcccaggaggggaaaagaggggcaggggcaggttagagacccttggaactcagcactcagccctaggacaagggccctccaccctcccaggagcaggaatgaagtcatgcctggtacatccattctctactgagacctggaacaccatggtgtacccaggatggccctgagcaggcgctacagcgactcctcgcagagttactggtgggaaaaggcacagaggatggtgatagagcgaacccatgaggcagtcacaagagaggcagcgacaaagctgagctgtggggtcagagaaatggcaggccagggaacagtgcttggaagaggtggcatttgagttgggtctggaaaaacgagcagctggagactggaaggagaggcctgctgggcagaggggaagtgcccaggggcagacaagtggaggggggttgaggcaagtcactagtccacattggctggggcgcagctgggaaagtagcagattaggctgcaaagggtgggaagtgggaggctgaggccagatgatgagtggtcataactgctgagagaaagtatttagacttaactgggtggacaagcagaaagtgtctgaatggagcagagtgggatcagaactagaccccggggcagaggtggatggggtggatcaggatggatggggcaggggtcggaggaggggggctggggcccaaggccaagagagagaggcctatgcagcatggtggatctagtttacagagcagagtggccaggtgccaggaacctcactcactgggcaatcaatggctggggagctgggggcagtgaagggagttggggagactggggactgtggctggctggctgattgaggagggctcctcgtatccctcttagcatccctagaatgggaagccagagagtcctcctcatttgcagtaacccagggtcacccttccttccctagagaccagaaggcccttccagatggcttagtacaaggaaagagctgccctggggccgggttggttcttggcaaagccaaggcaccctgctgaccggtgccagcctcagcagggagacagaggcagcagatggcctggcccgggggtgcctggcacgagcagacaagatccccaggccttagagccactggcagaggagagggacatcgaaggcgcccctgggggaagaacaccatgccagggtgtcctgggccacctgaatgctttcctggcagggaggagttggaaggggctgagtcgaggggcactccggctggaggctttacctaaggcagacctttggggtgggggtgacactgggctggggctgggaccaagagggtcatttgccaagaccaccccctcctaagccaccatccccatccttcccccagcattcacgctagaaaacaaacaaacaaacaacaacaaccaaaaaaaacagtcacataccaggcagtagaagaggacaacaaagtctgtgtcccagccaatgcttggaatcatctatggactgaggccacccccagtggtgctaggggatgcccacaggtactgagggtaggggagaccagggaccaagtaacaggctccagcggcagctgactgtggcctggggaaggggaggggtagcagagggagtggacacgtgggggcaggcagaggacaccggaaggtttatgaggacaatcacgtctgcagacccagcggtgatggaccgctctgcagagaaggcctcaagtcccttacccaccactaccatgacaccaggcacgggcggcgcacacatgggccacccacagcgccccgcaacacacaggctcacgcacagctgagcacagactctcagacacatcctctgataaggacatctccacagacacacccagagcgacacacacacacccctactaagagaggggctccccagtcagaaacagccctggaaacaaacagaaactcagagacagagacattcacacatagaccgcccccactcatacacaaacgtgtttggctcccgccagacccctgcctcgcttacacacactcacaagcaccatagccagtcacagaggacaagaggtgctgatggcattcacactcaccctcaaaacaccacagtcacagaaacagagacacgggtgcccactcacagtgagagacacacaccccggctattgaaacacacacacacacggcctcagagccacctacgtacaaagagaaagccccaggtcagggtgccactgtcccatgcctatcatgtcccagatatcataagtcagggaggtgacctctgatgcaaaagagatagaagatgttctgtcccccaccctgccaccagtgtcaacacatcagactcagggtaccttgttcggatgactgaggcccacctcgtggtcctgggagggagataaagacagggcctggccacaaccacactggctatggcctccacatgggcctgccccagggtcccaaggctgtgcacatccatggggcagtcacctggaagggacgtatcactagcagcagccaagggagaggactgggtggcatcagtgccataggaaaggccagccaagcccctcaaaggataaagatggaagaggggctgcgcttgtgccggtcacttggatgcatgagagatgttgagatcaaaatctggaacttcaggctctgatctatagagcacatgagtgaatcctgcccctccatcctctgtcctccctctggaaagtgggaagaatgatcctctttcatgttgaccccaccaggaacgagacacagtctcttggccactcagtgtctctggcgaagagaaactgtggtgggggaggcctctggggatatcatccatccccttctctgtctctttccaggattttaacccatgggacagactagcgtgactgagagcaaagggctcctctagtgttctctaaggtgggacattcccagtcactccccttccaacttccagcaccctgtacctcctcacccctttccagggtgtctgttcctcctgctgtgcccagtacagtacctggtggatagcaggcactcagcaagtatgtgacaatgaatgaatgtcaataaaataggaccgagccatgggtggagggtgggatctctgaatactctggtctggcaccactccctccatctcctggcacccagcactgctcagccttctgggccttttccctgggaatttcccaacaccagaaaccccccagttaggagggcagagggcaggaagggccaggagaggtctggctgtccacctcaagccaaatcttccagtgccaaagctgtctccctcccccatagtcagggagggggtctcaccttcccaaaagacagtgaaagggggaaataaagaaaggggtgagtaggggagaccccggcaggggcaaccacttgtggggaagaatcttaaaggagctggggcaaaatgagaggtgttctaagaaggtaagatggaagcataggaccctagggaccacgctgtgagaaacgggggaaaggagtgtctctcaaggcccaaggaagccaggccagggagtcctcaaactcctggtgagaagaggaaacagcttcttctctctgggagctaaggagttaactcccttcctctctcctccatcctagccactggtagaggggttcctacttcccctgctgctggttttccccccctcggccctcatgccctgggaggggaggggctagggcccctggggaggcttggcccagccagctgaggtctctttcctcccctgggcaggcatccccagcaggttcagtgagcaaatgacccctccttgacctcaagccctgaccacgcaccttccaaggagggagggcaacccacgggtccacaccggctccttaatcccctggctgtgctgcaccggtgcacacacccacctctcaactcccatgaacacgagtcagcgtaaacactcgtcccccgggctggggctaagccactcgcccctcctcgggcgcctgcccccaccgcgatgtacatgcatgaccctctcttccagatgtgtggatgacaccctcatctccttcccaatgcagagtgtgtgtgtgggtgggtgggtgggggtgctgtgggacgctggggaagagggcgcaccccgggaaggtcatgactttccgacgctgggggagggggcgccagcctgattttggagtgggggccggcccacgccgaaggcacctaatgcggtgggggaggggaggaggcgtttctcagggatcgggaacctgcaatggcctggacgtcccccacccctggatggctctcggtgccgcggagcgggcccccatctccgtgtccccgccccccgcccaacccgaggcggcgatcccggcccccacagtcgctcccccttacctgcggccacaggtgtacgtgcggggtccccagccccaggtcctgcgtccggctggggagggagggcccctactcccacccgcccgggctcttctctcccccggccgcctccgcagccgcggccgccgccgccggtgccctttgctgcaatgcgagagccgccgcggccgccgccgtgccggcccgggccccagtcgccccggtaaccgcgactccacctggcgcggcgctgcgcgccgccgtgcacatcccctctcgcggccccctccctcggcgcggccccgccggcgcagccccgcagaggagcggcggaggctggtggctgcgtcgccgcggtcacccgatacgccggcctggcgcccgggactcgggttgcagcaggagggagggaggttagacagcctggtggaagccgggggaggggctttggcttggagtccaacctctggtgccctcccaggatcctcttcactgcccccatccctaaaggtcccgcctggtggaggatcagggaggggacagtgttctgcctcctgctcaaacttcagagcccacagcctctccccaccggggtctttgctgtgcacctttggcctttaactctcccgtgacttaatccttagccaagtctgggaggcctaggatgcctaagtttcctagatggcctctcatcctgccctgctgtgtggttctggcctttccaaagtctctggtcctgcacttaacaaaagggaacctcagactcagccttaggggcagggagtgtgataagtatcaagtgatgaaaagatcctatgcacagacactttcctggttaattacagagccccaggaggaaggtctgctcaagcgctcccctttcctccatcagagcagatcccagatgtggacaggccaaaatccccagctcccccaagcccctgacttgggacaactgagctcacccagtccagcctcactcctgtccatcatccaacccctatcacagccccaagatgctccatctggggaggacctctgggcagacaaggcaccacaaccctacccatgcatatcacatcgtcctctgtcctatcaccatccctgtcctagccccactttggtctccgccatgcacttggccattcaggacaagtctgtcccacttgccatccagccttgggggcagacacattcctgttccccaaagttcagccaagatggggcttgggaactgggaaagaaattgggctgaatgccctgtgagtgatgacaagcatgccaatctgttactagacttgagttacactcggctaaaacatcctccctctgaaggcctgtcatttcctaggtggtcacaattttctttctcttaattctccttgaaaaagccaagactttttgtcctctgggggaagcagggtgtgtaaggacctgagcaccctgttcccactggattccctgccactacccctcctccgcctcctacagctgaatatcctcaagtcaagacctcccctgggctgtccccttcccattgcaactctgatgcctattttgggcctcagatgcctatttttctcccatagcaatgtccaggcctagctgggagcccaggcccctggtatcctgcctacatgtgtccctgtctaagctaagatctatcttcccataacggacactgaagcctgatgaggaagaggggaataagttcagaatagatggcttgatgcccaagtcttcttaaaaattagagactaagccatgaacttagcaagaggggtgagagagagacttcatgcagaacttcctgatggtgggacatctggggaaggctggatctgctcagaaacggaaggggagggtgtggagaggggaataagatagtcctcagtgggaggagggcataaaacccacagagcaaggtcaggggacttctgtttaaaggagaaagggatacaaaaacttttttaaaaatcctgagtatcttccctcaaaaaattccttctccaaagtcaaccaggcctgaggaggtagtggcagggaattagacatcgggcagatgtgagtacgggacacagaagtctcctgaaaataggggctcctacaccaaagagaaaaggttgcaaaataaaagtcctgaacatcccccctccaaaaaaaaaaaatcctccccaaagccaaactccaccatgggcttggggggtggggtggaggtgggtgactcacctgggccggctggccagccccggagggggcggagtcgccatggaggtgggagcagagggagctgaggaggcatacggggtccacggtccagccgccaacctgtgtgtgcgaagcgggggacaccccattaggggaagcgggcaggagccgctggggtactgtgattgggagggaagggcattcctggggcaagccttggcacagagctcatactgcagaggggtctagcgatgctggcaagtcccttatttaggctgggtatctctctaactagagccctgctctgtttctggatgtctgcttttctgttagacctgggggttccctgagcccagggcagggccttccctatcagacatttctgaaattctcatctccactttattttttttgagacaggttctcactctgtctcccaggctggagtgcagtggcacgatcatggctcactgcagccttaacctcctgggctcaagtgatccacccacctcagcctcctgagtagcaaggactacaggggcaaaccaccatgcccagctaattaaaaacaaaaattatttttaagagacagccatgttgcttaggctggtctcaaactcctgggctcaaggaatccacctgcttcaaccttccaaagtgctggaattacaggcgtgagccactgcgcccggcctcatatccaattcttggctgtccctctgcacactggcaaggaagctgctccttaccatctccccttccccagctctcatcccctcctcactaaaggtgtcacacctacctcacagaaataggaaccgctgggcaggagaagcctccccccagttgtctctgtcccacagcatacctttctttcctgtatctcagtggaagtgactccacccccttcgttccccaaggccaccccacacctaagaccatccttccagattcctctaggacctgtttcccgtggccttctttccccttggcatcctcagattcattcctccctcattctctcattcattccacaaacactgcctgagctggcaccgtgcttaagcaccgaacattccatggcaagtgaacgggccatagatcctgcccacttacactctaagtggggaaacgaatgagtgaaagaagaaaggaacaaatttgtgggtggctgggctttgattcatttcctaagtatttactgagttccaaactctgtgctggtgaacatgctagaacataggaggcccttagacatgcctatgccttctctcccaggcctgctacccctggaagctccacccagctgttttcatccttttcctggcccaatctccccaaaataagtctgtggctggggctcctgatccttcaccaatcccaaactccctaacccatgaaattggccattactttaccacaccacgagacacaagctctcaataccctctgcgcccacaaatcccggccagtcgcgatgtctgtttctctctccccatcctttggacttctgaagctctggtcaccctcctgctggccccttgtccaggggccttttttcccctgggacttcctcatggatgtagaacattcctggtcccctttccccaaacatcatgggctttctcccttcttagaccccactgtgccctgatggccactccgcatcccaggtccactttgtatctgctgtgaccgtgctcaactcttctcctgaagctgcagcctctctggagtcctgagtggtgcatatggtgccttaagagcatccccaagaatgccctacccactgctcaaacccgtctctgtatattcctctccctcacccccaaacatttccctccaaccctcctatttctctccaaggcaccaacatctccctgtcgcccaggtgtttctgtcattgccttctaggtccaggcagcttagccttagacctacacttggtcttcttccaacccccatccatccatcctttccccttcatcatccctgatacactcttcctcttctccttcccctgcctccagtcccgcttctcccctcctattcaccatccaaaagcaaacacagccaccttagccaccaccatctgccccactttttcagtcagctcccacacatcccactacctcccacctgagccttctcgccggccaggtggacctctgtgccagttcccaaaccaactcaggcctatgcccatgccatacacccccaccactcctaaaacaacattctttcctttagggctatgcaaacccttttcatctttctaagcctgatttagatacctcctcctgcaggaagccttccccgatcaggcctgcctatgatcttccctcctctaaaccccgtcccaactgactgttcccctccccagctagatgacaaatgcccctgcccttctcctcaagccagtgcacacaggaggaacccaatgagaggggctccttgagggtgacggcaacatcttcttcaactctctctaatcctgatctgcatcctgctcccagaaggacttcagagctgggaaaaggcaaaagccagacggaactggaggtggcactagagggcagataaggtagcagaaatgtgccaatgtgtcttgttccctgcagtgaggatgggagtggggacactcctccccatccccagctacatccagtagaacccggaaaagggagacagggactgacacacccccaggcttgactgaaaggctgctgatgggatgtgcatccctcccctcagtcccttcacccaggggtacaatggctgagtctcagaagccaatatgcagcaaccatgcaagcgcctcaccaatgcagaactgtacacaggatgctagacccagaaagcatgttcttacagacaagaagctcatacttgggtggagagatgcattcaggaccccgaggttctgggggaggtttaaaaaggaaccatcccactcgctatagaaggagacgggtcctggtctagacacaggcgctgtgtctcctctctaagccctactgatggcaggagagatacccaggtacagagagaggaggcctccagctccaagtcacccagcacgccacggggtggaacagggaggaaagaggtcaaaggctcccgttctgggctccattcttgcaggctgcaggaactggggacacatcggacccagcctactgaggctctcaaggcccgactctctcttagagtccatatcacagaggtgccgacgaccccagcatctcaacttcaccacaggatggactctcaggcacagaacaacagtccccaaggctgtcctcctctcctttcctcccagaagagttctgcccaaacagcctgagttaaagaggctgggctctctctgccccgtcacacgctctcgatttccggactgcaggcagaggtctgggggccaagcccccacccccttcctccccaggctccagaaaaggccaaccagagccactgccctggagggacaactccccaactcctccccttcttccctctctgctccagatgcctcccagagttggaatgagcctggggacacggagcacggggtcagacctcctcccctgcccgctggccgcggccgcagccgcagccgcagccgggagcccactcacctgctctcgcatcctgtcctgctggcctcgcagggccagggcgtgctgtgggtacttgctcttcaggtggtccatgaaggcatcacgcttgcggtcggcgtccgccttctggagcccgctgagcgcctccagactctgggccgcgatcaccgtgtgccgccgctcggacgtgtgcaccagccccacgttggagaagcgccggcccccgctgcccccgccgcccccgccccccagggtccggtactcccgcgggtactccgcatcgtccgcagacagcatgggggggctgctccgctccggatctgcgagaggtgagaggggcacggctgggtcacggcgcgcccggcctggggctgcccatcccccaagggggtccctgcgggaaggggcggggcctgggcctaaggagagtggagaggcgcccggggagaggcaggggctgcccagcaccccactagggactgaagggggaagtgcgtggatggcgtggaaagcgcgcctacggcccctagggaggggtgaggaacaagggctggatactccctgttcctccgtgggtttggagcgataatgaccgcgggggtgcagccctttgaggccaagggttgggggtttggatgaaaggggtagaaggtatcctgagaccctctccagccacacaaccccctcccctcctaaagctggtgccagcaggtgagggaaggaggggtgctttttagatgctccctaaaagacgtgaaaatgagctcgtagtcttcctttgaggttgggggcggggagccctgcctcctccctcagactagcatatgtccaggacatacttatcctcaaggctgggcgccggctgggaaaagggccagggcaggaagacatggggagaatgagggcaaaaatcgctctcaggtttcccatggagatggaagcccagcgtctggggcagtgggaccccttttcccttccctccccagagacagacagatagacagacaggagaggctgggcacagagaggacagtgagagatggatttggaacaaacttaaagggaaagaaagcagacagaacagctgaagtccttcccaggggctttccccccacctctcccctcccttcttcagtctctcctcccgacacacacacaagatcaagacccataagagacgtacaggggacaaaggacagcacagaagcaaaagaaagagaaggccgggggttgaggtcccacgcggaactctgaatccccttcccaaatgctctccagccctgagctcctggcctccccaggcccagccctgctggcccgcactctccagcttcagtgaccagtggccaggggttccagaggtcacgcatgcccctgggggtggaagaagttgctgggggcctacctcagccatattcctgggcataaaacatagatttgtgcccctcagaagtcagtccatagggagacaagcacagcctctcctgcacaccccagccccacaatccaccagccccaaagcagccctccaagtgtggcctaggactggggcatcaggcgctgcagcagacacatgcactcccgcccccgtgtggcctgactcatagggctcctccaagggcagcccagggcaacaggggacgcggctggaaacgctggaaaccagccaggtttgctacaagcctcctcccgccaagcatccactgtcaggaggtctatggacagctgccaggtctgccatcccctgcccagccacagaggaaagaggagattcagccaggtttcaagaaaagccacctgcccccaacacacacacacacacacatacacacatacacacccctccctgggcaatggttgggttgtgtccattaggggcacagagcctgcgaggacccagcacctcccaccgaaccaagggaagaagggctcccatgggcatgagagccgcagctcaccagggcctgaccacctgcctcatggctgcatgcttccttccctacaccccatcaggtgggtgttatcatggtccccatttcagaaatggctactgagactcagagaagtccactgacaagcctaaagcaacactgaatggaagaggcctgatttgatctcaatatttattacgtttgtgccaccacactctccacgatgactgtttcttgagtgaacattgacagcaccacatggcatgtgtggacttcctcactgacctgctgctatccccaaccatggccctgggtcttgggtggtccctctcaccatggtcaccatcctctgttgtgctccccaaaataaggtccaaatacatgagagatgactttgggaagaacattattttatgtcttctcttccttcctctttttttctttttctggggggacagggtcttgctctggcactcagcttggagtataatggtgtgatcatagctcactgcagcctcaagctcctgggctcaagagttcctcccacttcagcctcccaagtagctggaattacaggtgcctgccaccacacccagtgaatttcttcctttttttagagatggggtcttgctatgttgcccaggctggtctcaacctcctaggctcaagtgattctcccactttggcctcccaaagtgctgagattaaaagtgtgagccgcggaccaggcacgatgactcatacctgtaatcccagcactttgggaggccgaggcaggtggatcacgaggtcaggagttcgagaccagcctgaccaacatagtgaaaccccatctctactaaaaatacaaaaaattagccgggagtgatagtgggcacctgtaatctcagctccttgggaggctgaggcaggagaaatgcttgaacccgggaggcagaggttgcagtgaacggagattacgccactgcactccagcctgggagacagtgtgaaactctgtctcaaaaaaaaaaaaagaaaaaagaaaaaagaaaaaaaaaagtgtgagccaccacacccaggtctttttttttttttttaaatacctttattttcataaggattagaaaaagccccaattagaaggtcaaaccagtgatttcatggatatagttccttgggatggtagtgaaataaagtttccttttaagtaaatttaaagttcaaagtgagctaacaaaaacgtatattgcattagtacagtacaaaaggtttcctgatatgatggtaattcgtgaaatagaccctgactgagtgagactgggaacactggggccatcttcctgagggcccagtccctgtctttgaggtacttgtggcaacccacagtggccagaagtgtggctaaaggagagtggcctgaataatgcctccatgagaaggctgggggttccctgggcgctggagaaatagctccaaccaaagtcagagggttgcctcccataacccctgaccttcctcctcctccactcaccctcaccaccagccagaggtctgcagcccattgggtacaagtgagaaggaggggaccctctgaggccaagagcctttcctttgcccaggccttgtggattctgccgtggccttgctgctggaatccagctccacagttcaggcctagtcctgcctgagccagaaggacccctgccccttatgccagagatccaggctcctctgccctcctagggctcaggacaacattgggacaggtctccaattatcatctcccagctgcttccttcctggagccaaaagagctcctcatcccctctcttaccccctcctcatgccagcacctccttccctacctcctgggggatctcagtgtgtctggggtggagcaaacagtgtaccagcctgagatgagtggtgactgtggagtgggagggtccccaggtcacccagttctcccaggcagattatggcagggagaggtcccagctcccagctgctggagcaggcagagggtagggcatggagctcacaactgcactatatgactgcagtcccacaaatctcacagttggcagtggggaggggctgctgagcagcctgcacagacagggaagcagggactacccctcactgcctcctccaggccgtcgctcagccctcaggtgctctggcattggggctattggggtgaggcgggcaggagctagatactaaggggtggcagagagaggggagggggcaggagagatgatctgctctctctgaggggcggtggcaaggaggagctttgatgtgaaaagctttagaatctgtttaagaacctttgagatccttggcttttatataacaaaaaagtaagctgaggctcggggagaagggaacgcctgggtagcctagctgtcctggcttcctactttgtacagatttaacttctttctgcagggccccagctgagctgggaggatgaacctgggcttctggttgagggtgggggagcatcctgtccttaggagagggaagccagtgaccagcctcctgggggggctctgaagattcaggcatgattttaactccttcagcaggccaggcacttgaaatcagaacactgggagagaaaaacccaggccagagacaccctgggtgtcttagcaacttttctgagaccccaggctagccatttatttattttttgagacaaggtctcactctgttgcccaggctggagtgcagtggcgcgattatggctcagtgcagcctcaacctgggctcaagctagcctccagcctcagtctcttgagtagctgggaccacaggcacgtgccaccatgcccagcttattttggtggtctgttttgttttgtagagatggggttttgccatgtggcccaggctggtctccacctcctgagctcaagcgatccacccacctcagcctcccaaagtgctaggattacaggcatgagccaccacacacacccagcctcattaatttacttactcattcagtcaacaaatatcttccctctctgagcctaagaacctaatttgtaaaatggggatgttaacgtctaaactctgcctttgggcactaagtgagaggctggcaagacaatggtagagaaagtaggttgttttctttttttcattttctgttttttttttttttttttttttgagacagagtttcactctatggcccaggctggagtgcaatggtgcgatctcggctcactgcaacctctgccacccgggctcaagcaattctcctgcttcagccttctgagtagctgggattacaggagcccacaaccatgcccagctaatttttgtatttttagtagagacggagtttcaccatgttggccaggctggtctccaacgcctgacctcaggtgatccgcccgcctcggcctcccaaagtgctgggattacaggcgtgagccaccgcgccaggccaaagtaggttgctttcaatgaaagacattcctgagcagcgatgggcttgtagcagcctgacctccctgttacccctacgcctgttccagccatcagcaagtcctcggagtggccctgacccccctcggacctgagcagcccagggaaaagacacagggatcgattccaatctagcaagcggatccaggcacctgccagccctgcacagatcaatgcgtcctgttccaggcagggagggcatgagagacccgggctggggtcttaagcatggctgggttctgctgggagagggataggggcattgcgatagagagagacggaggcagggaactctgggggaagggaagcaaagctaggataccctggtggaggggcgttgggcctgaaggttccccccaacccagggatggggttggggaaaccagagacataagggagggggctcagggcttctcttttctccaaggaacctcagtgtgcaaggctgactatattttttgagtccgagattcaagccacagggaagatgccaagaactggcgaaatccagaatccgaatgaggggaagggcagggtgaggaaggcgggttctgccaccctcagctcagcctgccccgcctgggaaacgcggaaggtgaaagtggcctgaggctggggtggccgggaagtggcgggcgccccccagtggccggctaggaggacggcacaggtgcttgggaagagtgacgttgtcatttgtccgaacaattccaaattctacgtttatttatcagcctcatttatttttatcctccaccacattcttttacatgagatcactgtaactgattatgagaattaagatcccaacatcttagtgacaccatctcataagccaccaagccggtccccaactggcatctttaccccggatgtaaccctctactctgtcctctggctgcccctgggcaacattcacacatgatgtcatctgcaaaggaggagaacggggagaggagaggagagggagggagaaggaaggagagaggcaaatggacaaagtagaggaagaacgaagccaccagctcaggaaagggagaagagaactctctggggcccctgatgtgagtcctccccagccccaaactcaagatctggaaatcaggtccctgtaaccctctctgtggagataaggaggctggacaaaacccctcccttggggacctgagaggctgtcacatgtgtgccccgacccactgcctgggcaggggtaggagctgggttatagccctggcaggaagcgagggcaggaggcactcagggtgaagacaccaactcacaagcccacaggacatggggctaggcagggcagcaggagaggagcatggagacagctggaagggtggaggacctgcctgccttaggccacacccacacacacacacaaacacacagcatgaggctcccccagtccctcctctgcagccaatgctacaggagcccaagtcagccaggaggagccccgaggcactgccaccttcgattgtgcatgatgactccatcctgctgggtgcctgctgcagtcgggaagcacacggtgtgcttggaggttggaggccagaggacaaaggtcaaccgggaccagatatgtatcaaactaggcagaggctctgggaacccgaattaggagaggggatcctttgcttcccctgctagtgaaggaatcggcctccctgtccctgggtgcccctggctctgccttccttgtgtgcccatactcctcagtttctgctggctggctgtgggtccttggatcagaagcccatctgtgtctgttttctaaaaccatcttttccgccccataccacagcaaccaaagtcattttccgggcaattgcctttctgtaaacattcctgtgtaatatccccccaaattgctaatacccagcgccctgttgagtctccctgtcactccaactaaagcctcggagatgagggcgtgtgatgggggaagggcgatggggggaaggaggcagctggactgaggattggagacagggggctcctgcctagctcctggcacagagcgggggccagaaactctgcacctccccacggtgatccccactccctgccagcccagccccaccccctgaatgtcaggctccacttcaggagagtctgcctggactaggagggaagacagagaggaagtgggaagggagcccactggacagaaggcctgagacagggcctgggaggagaaggagctgagttgaaggcatggaggagatggctagaaaataaagactcctggtgactagggcagggcactagggacatggggcaaggccaggcaagttgtcttcaaggaatgccagctcccctccccaccaagggtgacaaggaggacagagaagagggtcgaggccagggaggatcgaggccatccccccagcgtgggccctgcccactccctgggcactgtagtggatgggggcggggggagatggacaaggcaagaggtgtcaggtggttcttggcaggtgatacacctgttgtcccctcctccacctcccagccctgatctataaagccaccatggagaagggtctggagcaggctgattctcctcatcatacagcaagggaaactgaggctcagggaggtcgagtgatctaatctgagtcaccacatggactcccttccccaggggtgggggtaagaagggggactaggactgtggcctatgaccctgtggtctcttccatccccctgcccagggaatactgccacccccttcccaagctccacagaagctgggcatccaatgggatgggggatgatggagccctggagggagctgggagcagaggtgatgcaaagggcagctagggagggtgcagggcactgccagtcacagctttgtgtaggcagaaaaacacaaaccaatttgtgcagatttaaaacccactgaaggccacttagttggtaaacgagtcagaatctaattaaaggacctcttcgaggctgggggaaggcactgacacctgcctaggaggagcggtgaggctgggggcctgggccctggctgctactggtggagctgctggggctttccatggggagagcagatttgagggggtcaagctccctgcgggtgggcacccggggaggggggcgggcatcagatgcttccccagcccagctcttcctcctcgcccatcccaggctgactgtgtccacttgcacagacctgggcactcccagggcaggaccctcacctcctccctcagactggggcctcccttatggcagaagggccattccacccagaagggcagaattgggtggggtgaggaggcccacccaccacatcaggagtggggtggggtcctggggactctcaaagatcccaggcttggcctcggtgccacctccaccaactgcactggctctgcatggctattgagtccttgcttccttctgcttgcagctgtctctcccccagggccccaggccacacagcacagcagctctcagactctggtggtgaggtggggcctcccctcagctctcagctctcgggaagaggtggccccctccttacccgtcctgtgtcgggaaaccacagtgctctctctccagccagatgcctttcctaggcaggaaaccaacacccagagtacaagcctgacccaatctgcaggagctgaaggcagagcccaaagtggaacccaggggtcctggccctcagggacaaggatttttccattccacgatgccacttcccagaaagcagctgcctggggagcccctctctaggccacgggccccaggaggacacagactaacaacctccttaggaaggatcagcagcaaggcagaaacaccgcagcagcccggccgacagggagaaaagctggggtccatggcccagtgatgcccccagcccagggggatgctcaccacacagaaatcagggtccccgcagggcatccgaactgcacattcagacaagactccccatccttgcaaaatgtgcaaatcagccccgtgcccagaattccagatatacaaccctctttcttccccctgcccctcctctttcacacacagcaggcaaatctgtgacattaccaaaaaccactgcatccactgactagttatgtgaccttgagtaggtcaggggatgctcagagcttcagtcctctcatttgctttaacaaaaaaaaaaaaaaggaagaagaagaagaagcagaagctaataacaggcaacaggcaacaggcaacaggcatgcagactgcagagcctgggtgagcagagtcagtttcttctgatctaccccggagcccgatttccttccacccactgtcagagttgtatcagacccaggactgtggggttgtgatttttggcttctaatgaagatctggctaattggcttccctgggaaggaagggggcagagatatggagggcagcatgtcacccccagtctgaagctggagctggaaatgctgagaacagccctggcatgtgcccacgcggcactatgttaaccagctaactcctgtgtggcagctccactgctcacgcgcccagggaaggtgtcctgtcagctccacatctccttggagaggcagccgaggggaacacaggccgagcgggaggggaggagggaacactggagggtgggaagggaggaaggccggtgcctgtcctcagctctgccatcactctgaggaggctgccagggcgtcttctccccagggggcactccagcctgagtgctgcgcccctctgtgtgtgaaagggatctttcctccctccctgcagctgcctcaggctgaaagcgtgcccagggggaagcatattgtttccaggggaagagactccaatctgttggaagtgagtggtggaagccccacccaccatcctgcctccccacagggaagcattttcaacaccaagtactcatcaacgggctcatcaatattgggcaggagacccagccttgccaagatgcccttgatatcctcctcagagacaccacctttcatggggacaggctctccctaggaggccttgtcccagccctatgacctagtagcactcagacagctccctcggccgctagaaccagcaggattcctccgggttcccagcacacactcagtcgcccaggcacacacatctgctcactcatgcttctacgtcaaacctgtgcacctcggcatgcgcctggctgcccagtacttgctcactgacatgggcccagtcacagcctgcctcaccagcactctccacctgacctcaggtgatccacctgcctcggcctcccaaagtgctgggcttacaggcgtgagccaccgtgcccagccatgataaccactcttgaacacccacacgtattcatgacagtctacatgcaggggtctacatacctgggcccaccagggtgccccactctgccaccttagatgccacgcagacagggagaatgtcatgccagtccacgcagctcatgcagggcatctggggctcgctaaagcgccaggtggatgcatctccagcttggggtgaaagacagtggggacttgcccatcctgagtccctcatggaggcgacatcttcagctccttttccactttgccaggttcggggctcccttgctgaggtgtttacacaatgtcttaaaatacaggagtcagcccagtaacctcaaggccacctactctgaccaatgcttagccaatggggcgatgttcatgagtgagaccctcctctgggacctggttgcctccagccctcattccacctctgtaggtgctcagcgcctccaccagggcgagggggccggagagcctctgcccagcttccagctctgctgatggggaaggacagggctgctgggacccaaggcttagctctcacctcatgggttaatttctctgccaccctgcaagctagctaagaacaaacagccgaatctgcagcccatgattctctctccctagggacaccctgttagtatcccgagagactctggaggatggggcgagggcagcccggagttcacagtttggaaaaggcaggagacttggcaagtcggcttggcctctgggtcaggcagtctttggaagccagggcctggtcagatagcaggggcatcttgtggaagttctctttgttgtctaacctgagctctcccatcagagcagcatctgggaatgtggagcacaggcttcaaggcaaggaaaaataaactgtctccccttctgcgaaagacacaaagactcccaccctcccttctccaatccacacatccatcttgagtgacgagggttaaacccagcatcgggctttctggaagctgtgggaaatatggaccagccatgaaatgataaccactctttttcttgagacagtcctgctctgtcgcccaggctggagtgcagtggcacaatctcagttcactgcaaacccctcctcccgggttcaagcaattctcctgcctcagcctcccgagtagctgggactacaggcccgtgccaccacacctggctaatttttgtattcttaatagagacaaggttttgctgtgttggccaggctggtctcaaactcctgacctcaggtgatctgcccgccttggcctccctaagtgctgggattacaggcatgagccactgcacccagccatgataaccacccttgaacacccacacatattcatgatgatctcaaagggctcgtgcagccatcattctcttcattctcacagtcaccttgtgaggttgcaaaccccctattttacaggtgaagaaactgaggctcaggaaggagtgacttgtccaaggtcagagttgataagtggaagaggctgatctcaactgccggggtgcttagcccattagcccatgtccttcttctttcccctacactctgttgcccctgaggaagatgctgattctgccaccaggtcatctgtgagtactcatctaagccattaggccagagccccacaggtcccctctgtccttcctacaccctaagaagagaacgctgaaacaaccctccttcccagctaatcttgggcgccatccacccagtcctcttgggggggcctattccccagggctggaggagagggaggaagcagagccacccccagatcacagaaacttaggctggaagtgggggtcccacagtcctgaaagaccttctaggggatccacctttccacagccctactcgtagccttcttgtacctatgctggatacgaagccctcccagcccctgccacaggctgtgcagagacagaactgcaaatcaggagctccagccagtcaggtcttagatacttccaggaaaggagaactcattacatccaaagcaccaatcatcttgtggggtttctccttccttaacatgagccacagtctgtgcccatggccctcaggggaacctgggggaaggtcatgacctctccctttggagcagagtggaggctcctgaaccggaaccttctgtcataagccctcaggtccttcctgtgtggcccagccccccagccatctgcaccaccctttgttgggtaatccccatgtcaccacccctcttggctgctggccttcagaactgctctaatggtccagatgaggtatgagcagcacaggtgactcctctctgcttctgttactaaagtgccttcgctagtgcccctcctgcccacacagcacatgtgccaggaaaaacaaatgctcagggcctaagagcgctgttccagggccagaacataccttccttgcctcctgctcctaacgctcaggcctcccccagcctcagacctcagggggccagcctgactcctcctgcctggaaggggtgaagttcctggcccagtcagctgaaactgctccttccagtcacttccatttgctttctggtgcctggccttgctaatgtcacttaaggggtctggtctgaatcttagcacctcccagcaactatgcccctcagagccccagctccagacaccaaagggtgtgcccaggagtctgagtgggcagcccgctctgcctggaattctctggctagtggcctgaggcccaggatgcccctgtctggcagccagtcactgtgagaagtggaaaaccacaagcccacatgataatatctgaggcatattaaccacacagtgcttcctccttgctaacctacttcctcctccctgccctgctgccagagggccccaggcttggaaggagaggctcccccaccctcagctgcttccctgcaagtgccccgtgtctgcatcccatgcttgcgcagtggctaattctggtgtctcatcagacagtaattatgggggaatcagcagtgccgtcatctctgcagctcggcacctgtcaccacgccgccatccccaggctgctgggatgggatcggaagctgagggaggagggctgtgctggggtgaggggcatctgcacccttccagcctctgcagccctcacttccctgccctgcctccccaaggtgagcagtgcacctcaaccaggtggtcaccagccacacaagtgctccctgttacccgggacaggtactgaaagcaggtgacatgtgtcccatgtatgcatccccatgaccaaacagaacaggcagaaggacacagcaagccaaggctcaaatctcaccttggccacttcccatatgtgtgaccttgaacaaatcatttcagtcctccaggcctcagtttccccaatggcaaaatggaaaaaatagtgcctcccttgtgaagatgggaagaaataaggtgtgtaaagtatctagcacagtgcctggcacatgtgtcatcatgtagtcattcaacaaacaattcatacacagctactttaatgtgttaggcaatgtggggatgccaagatgaatgagatgatttagcaaggatcacactgtggctacactgaagcacaggctttttttgttgggggggttggggggctggtggtgtttggttttatttctttgaattttaatacctctaaggagcacaggaagtgaggtaaggaagggagggctgcagaggctgcaaggcacccctctcctcaccacagcccccaccattccctatcatcctcatgcatcgcttccctcatttgctgtccctgaaggtactgagtttgctgcccccacaagcaaaagtaggctagtgggcttagttatgtccagaactggtgattgttcaagaaaggttacattaggagccaccagaggtttgacagtgctctgggagatcggaggggcgagcccagaggcggttgttggggaagggcatttcagggaggagcaggaatgggaggtgatgaagaggagctgagccacagaggcaaaggcccacagggaagaggccagacccaaggtgagctgctggggcccccacctggctgcagcacggactcctcaggaggaacagggttggggaggaaggtgatgaatctcagtgtgaattctccatggcgctgggccacagaggagccctgctgccagagtgcagagagtgaggaaaaggggcacgagggaatggggcaagacccatacaaagcttcaggtgaaggcggaggggaagggagggtgtagggctgaggctgccctgctagagactgggactctctctctgacctcaggcatgctacttaacccctcaggtctgtcgtctcttcccccacaaaacagtcagcagcagtgagctcacaggacagttgtgaggatgaaatgaactaacacttgtacaatgcacaacccagcatctggctcccaggaagcacccaataaatactggccatcagtgttttcattattaccagtgatgattttttttctcaaaactcagcaatgactaaatgagccccatcccctgaaagcccacagagggagcacaggtctcttctaaccaaaaccagagtcaacagtgaggggctgaccccggtgtccactaccatggtagcctcctcccgactcccaccccctacaccctcactaggcattgcaatactccttcatagcacttttccaaaacccatccacatcttattccactctggctggtaaagccaggacggggctgcttcacctttttacggaggcagaaagtaagtcttgtaaggtactgagctccccatcactgggggtattccagaaaagggtgggtgaaagagaagaacattcaggtctcagaggcccttgccctggccccctctgcctggttcactgcccctgagcccaccctgcaggctgagccttggcccctctgctgtttgtgcagggaagcgggggtaactcacgcgagcaaggagggaaagggctccaatctcaagtctctccgcgttctcctggcttctcccggcagcagccaaggatgggggagggaggggagcagtgtcgttgctcttttaggaaaacggtaattttaattaagaggcagacaaatgagcgctctgcagattgtctcagagcaaagttattaaaaagccatcaaggcggcggcagccacggtggcaaggagagctgcctcccccagctgcccacccagattgtagctgaatagcagttcagagagctggaaaagggctggaggacgtggaacctgaaaatagcccctctcctaagaaggcagggcagcatccagatagtacccagggtacagcctgcccaaccctgggcagcaggtggggacgcaaagggcacctgcaattaggcagcccctgctgtgggccaagtctgggcccatcactactttttctttactcttctcaacaatgctgcctgggaggtgttcttgtaccactttacaggcacaaacactgaggctcagagagggaaagtggctcgtccaggctcacacagctaggaaatggctgaagtgggggtttgaacccagggcaggctgactctcaagtccaatgctccaggctgctggtcctgggcccagattttggggggcggcttcccctgcccatacaccctcctccagccgggctgtttgatgtcctctgaaacagcctcaggagcagcctaatgatgttgcccttagccatcaaggtcactagggacttggaggccaagtaactgcttgcttggcaggggcacattatgagaggacactctacagggacataaagttacaaaacagcttccagcagggggaacaggggcagatagacagaggacaggcccccacagccaggatatcttccaactcttcaacctctacttgctcaacacttaagcaaagcatccaggaacctatctgccttggttgctgttagactctgagcctagcccagtgcctggcacagagaaagtgttcaataagtctttccccgccgccccgaccccgagatggagtcttgctctgttacccaggctggagtgcggtggcgcaatctcggctcactgcaacctctgcttcccgggttcgagcaattctcctgcctcagcttcctgagtagctgggattacagacacccgccaccacacccagctaatttttgtatttttagtagagacagggtttcaccacgtttgccaggctggtctcgaactcctgacctcatgatccgcctgcctcggcctcccaaagtgctgggattacaggcgtgagccaccgcgcctggccttcaataagtctttattgaataaatggatgaatagataaacaagcaaacaattgaataaatgaaacgagatcacaagtttgcatgtgactgtaagctaaacaaaatggtcccatcttctcccatcccccaccctctgggcatcactggaacatgggcttccccccataagaggtgccccttgctcctgacccctctccccaggccacaagccccctcagcagaggattcccgcctcttctcttcaccccagccctagcttacatggcggctttgcagcctgcacacacatgtacatgcacgcgtgcttgtacacgcacactcactgacatgcacacacgtgcacatacagacatgttctctaccagccaaagtgccccccccagagtcaggtatctgctgccccctcccctggcaaaggctgggcccaccagggatagccccctctccgtttctggccctccaggctggggaggagcatctgactacggagagctggagagctggcaggaggaggaatcgtggggggcctccctcctcctggcttactaacctggagactttaaacagagggaacagagtcctggaggcttccctcccgccgcacgctggagccctgggtgagggacaggaaaggaggaaagtcgtgaatgaatgcccagaaaggcccggctgcagaggagctggagagaggagggggccggggcaggggctcccaaagtgggctaggtcaggggcagggccatgggccatggggttgggggaggtgaagcaggtacagagcaaggcagagccttaggagctctccctttggggccccccagggcagacaggatagagattgggtgtcataggaagagcagggactgagggggtagagacactggtgggagacagacagggggacaaacagcaggacaacacagaaaacatggggtccccagaactgggttcccaggacagacagccaacaagccatgcctggttctccacccagaaacaggggcagacactttactgaggtgcccaacctagaccccaaatgatagcccgcctgcctccttcatgccaggttatgccattctggaaggttgatgggttcagggtcagagaggcttgccatcattcccctggtgacaaccctctccccagcctacgagacccccatctgctccactccccactaaccctgagaatgcccagcttcccctgcctgtgttagaggagacaggcattccccacccaaaaggcactcataggttcacactgtgctaggagcacagacctgcctgaagtccttcacctagctactgcctccacacccccaaccctcaacctgccatggcagggtcccctacagctgtccaccatgccccaccctttagaaaggttagaagtcctttctaaacctactccacctccctcatgctgcaatacctattagccttttaccctggggcatgcagcagttaagacccttcctgccgggagacactgtggccagcacccactcaggcacagccctccctgggctggctcagacccatccatacccacaacacgtctggctacaagcattctcagagccccctgccaatctcatggttccaattttcccaccgattacctaaaacatcgacatcccagggagaaacagctgttgggacacggactgggagaaaatattaagaatgctcattgatgtgtctagccccagagaacttcctggatgaggcagtgggaggcacaaaagtgaaggcttaggagctccagcttccttcttaccaccagccctaagtggcagctccaggggcccagccccagacaggctgaggtgaggatctgggttttcaaaaaatctaaagaggtttcttatgtatgcccttttctcagtggagagtgggccccattcaatcattcagtcagacagaggaagaggaggaagataaagatatgactatttattgaatgtctactatgtgccaggaactctgcctaaattacctcatataatcctactacccactctgtgaggaagccagtgttaatgctcttgatctacagagacagaaactgagcttcagaaaggtgaagcaacttgccccaaaccacacagcaaatgactgtcagggctgcgattgcagcccagagctgtctgactgtagaccctaagctcttgacccaggagctaaactgtctcctatccactcccacccctctctcagtctttggctatcttccttttggtggcctctgggaagttctgcctaaagaaattatctcctatgggcaataaggtagaagagaagatttctcttcggctctgcctcgtcctaagagtgggaggcagactgttctaaccccaggctgccagtggaccaggagggggtgagccatcaggttaaggagagaggtgggtctaggttttcctgagctttatctttaggtgacttctgcctctctaatagccccttcctgcccctcccacttccaggagagaggaagctccaggaagccccgcacaagccccttcacgttttaccaaccagaagttcccatagtgcccaggtagaggagagcccagaagttctggggtggacaaagtgagagtctgcggcagtccccacagcccttgcctctgcacagagtcctaactttccatggataagggggctggggacaagaatgggggactcatcaggccagcctggtcactgggtggggtggaataggcagcagacagcccaggagagaagacagcaaggcccatcccaagggcttcaaggaaccatggaaggccttccctacgagctggggtcattcattcttcccataagaagcagaggctggtgtctggagtgatgtctgctgcgtatgcaattatcatgcatcctaggggtgaggggagactgcagaacacgtcccccccgcaatctccccagctctgcacaagcagaaacagctaggctctttctgtggggtctctgggtctggggtctctctataagctgagtctgggggcccctctatgggcccctgggtctggggtctccagcatgctttgccagctggaatggaaaagaagccagtgccctggaatgcgtgtgtttgcacaggtgaggaaggcaggcatgagaaaacccaactcccttccagtcttgggttactccacatcaggacatgcaggcaaccgaggcaggtggcctgggctaccaggagccaggataaggctgtgggggagctgagccaccagcttgaagtgccttgtgggagaaaacccgaattggattatagtccccggatggaatggagtgtggcaaagccagttctgctggggtgggaggaaaacagtgagtttagaattcagaggacagctgaatcctctagccactcccttctccatcccctgggctgggagggcagatgtaggcaaggtgtgccttcggaacaggagggggctgtctgtaaggcatgagtgtgtgtgtgtatgtgtgtgtgtacgtacgtgtgtgtgtattccaatattctcttgggccaaatccccattttttttttcttagcttaagctgggaaacagtcttcccaccctccatgtggcaaagcaatattatctcaagggagaggaggtagagagagcctgggagctctggaagggagcttgaaggtcctctagtcccaccctcttttcttataccaaggacactgaagaccagagggggcaactaaattgccaaggtcacacagcagtaggggagacaggcaagctgactccagcccaatgcttgttctttacaatttacttctttgccctaaggagcagaggagcagcttctctctttctcctcctcttctccctctcccggagcactggatccctccccagcagggtcccctgcactctggcaaccacaccagccaaactcttcaggatgcccaaagttcatctgaaaggtcacgctgaccagtcccctgccgctaggtccaacactagtctacgggtgctcacagaccaccgtcattgaggtgaaagatgcaaaaataccactggagcctcccatcctgaagtggccacacgctgggaggtttatcttcctatctaacctcgattcctcctactacagcgtgggcctgcttcctctcaagctgtcctatgcagagatggaggcagggggagaaaagcaggtttccagcctccacacccttatgtttgcccacccccagcagacaggatgagggcagggtgtccctgggtggctgggcccaagcccagtgcatgcgtggggcccgaagggtgggatgagggaacagcagcctgggtatgggggaaacagctcttctaggaatcgcccctccaagtcctcatcctctgcaaaatcctaactaagtctcaggcttagacttctctaaggattattatcttctctgggttcagagatgtctgtcccctatcccctcataattgattgtttattatcccaacaataagttgattgtttagtatatgtccggcactgtgcgggatgttttcatctgttgtttcatttaatcttcacaattccaggatcagaaacgaatctgtcccctgggaccatccttccttaagactaagtctaaccttgatctctcttgctgcatttcctctggcccagtcctccttggtggcatttttgttcctgtcttcagagactcttctcatgactcagtggcctacatgatctttttccaggctatcaacctttacccagccctgccccaggacggggtagatatgtaggtaaaagcgaccaaggcatgcgaagaggctctgggggaggtccccaaaaggtcaggcagggctgttggaggtacgggcaggactagggtggcaggctctcctccctcataatgtccatgacccctgcagggggcctgggccccatcttctgtgtggtagctaagagggcccagagaggcaatgaatgacctagtccttctcactgaccatctctgaggcccaggtttcagcacacacatccccagagcccaggggaatgggcaaaagcaggcaggggcacaagggcaggacttgccatgggttgagcctgggaggtgaagccggaggaggagctctgacacctggctaagctcccggcagagggctagcaggccctggagggtgcacagcctcaagcccctctgccggctgcagtatcaggcctccgtggggttctgcacaccccatcctagctagccacaggcaactttggtgaattcacccaccacttggcttctctgttttgaccttttggagcagaagtgctgagggcaggggtcccctcgactacagccatccccccaaccctgcccccagcatggctggaacacaggggccagactcacctccccagggaatgctcaagcccagctttcacccctctgggaaatcggagcagcaaaagcatgggccaatgggcaaggggagttggaatggtgggtgggactctgggccgggtgtgggcggcaccctcccccttcaagcaggcaccattaatatatgcaaagcatatgcaaatcacccagaagagagacacaacaccgctggaatgtcacaagaaaccttggagatcagccagcccacgccccctcatttcacaggtgaggaaagaggcccgcgctgggatgggacttgctcaaggtcacgcagacatctgggcactgaggaaggataagaatgagctctcttgacttagtgcagtgctttttccaccagggtcttgtctttctgctggggggtttataacattgcaaaggggccccagggcgtggatggggctccaggcaggcccatcagagacatgggtgggagatggagctgagaggcttcttggatgcctcccttaccgcctctgcacctggagatggtctggtgggtgtgaggggcagtgcaagggcagcatagcacctggggggccgcgcggttggaggggcgggaggctggaggtaggcaaagagaaatatgaggggcagggcagaagagcagggaacctggggtgtttgaggcaggggaggaagagcccaatgtcagggcaaggtgcctgctgtggtgtggggagggggatggcgccctcaacacatacacacacacgcacacacacacacacgctcgcgcgcacacacacacacacacacatcgctaagtgctctgcagcccttcctggactctgacaattatggcacctgacagaccataatagttaacccaggcccatcccttctgaggccacttccccgcccccagcttggcttctcaaccttccagacagtcctcgaaagcagggccagagctggggaaaggaaggggaggcagacaatgggaggggtggtcagagggaggaagggggaggcagaagaagagacgaggacagggttagagagagagacagcaggaagggcagcgcaggagaaattgacgaacagggagcgggaggggaggaatgggaagacggaaaggcacagaggagagatgggggaggggcgaagactgagggcatccaggggagtgctctggagcccaggtatcgggtagaggaaccctgaccccgaggttctaggctgcttggcaggagttggggaccatgcccctgcccctctgcccacctcccccagaaactcccctggctgccaggaactcagtcctccctccttcactgcctccctcccttcctccctcggggcaggcactgcttcccagccaaatccgaagccttcatctccgctactcagagcttggaatgaaagaaggggaagcgagtacagccctcaaacccgctgacggccagatttttattatctttgctcgaatgggccctaggaagccagtgagggattcttcaaagagcatctgagtgcctcattgaagcctgcacctgcaccagcccacccacagcaggcagccaggacttggggggcacaacctgtcccccaccccccacaaatcctagagtccagagcctcagctaccaggagactcaccctcagcagcttgtgcccaagcaggggtccctaggtcaggaaaccaggcttaaagctagacctaagtctgctgggcctctgaggcagtctgtgtccctctctgggcctcaaggacataaatgaagaaagaaaacagatttccttgccagggcttggaggagataaatgcttgagattcctcgaaagagcagcttttatggcaagccctggatccttcccctgaactccctgcctgcccagcacccacaggcccctttgcaagagcaccccccaccacagctgcctcttcatgtgccccaggcctgctacccaggatgacagacgccatgaactgttcttccttgagccccaaactcagctccctcagttcaaatcctcaacactgtctcccttctttccccaaaacctaacctggggtgggggtgggggctcaacaaactgggtacttcaaagagcccagccgcctccctcctaagcacttccagggctggggttttggcagagaattccaaggttggcataggcagatggcagccatgccacccccaccctctagctctgaccacactgtcgatgcccacagccaaagaaggaatcaatggttctaattaaaccctttttccagggtgggtccctggcgagagagagggaagagggagagagacagggaagggaggggggagagggggagagagagagaaagagagagagagagcgcgagagtgcatcagagaggccctgcatcccagtgcccaacccagtatcctgcacatctttaagacgcctggaacccagcagggatgaggccacgaagaccccagaccctccgcattaggcaaggaggcaagtagaggggcaggggaaagcctggggtgggggtagctctttgaggggttcattcgagcgacccttcccctagtggagcatccctctccactcagcactccccgaggaccacagttgcctcttccagatagagctccagggcacagacagtgggagccagaagggggatttgtgcctccatcccagccttgagggtcatcacagagaaccagccatcgtggaaagggcagaagaagcaggaattgttgtggggggactggacaaagaccctcttgtccccaaggcagggtggcaggaagccagggcaaagcctttgcacttgctgccagtggtgcctgggtgccaggcagtctgggtggggacagcggggtggagggggggtgcatcttattcttggaaaccctccccttatgcccagagccctcaccccatcccttgcttctaccccaggccaccagctaagtctctgtccccagcaactctcagcttgcctggagcactccttcctgtgtgaatgttccttcccatgtccctgacacctgtatggagtggcccatcaccaaccagaaccagcaaaacccctcaaatgcaccatagctgctccccacatacaaccacaccagaaaccaccaccatcacagctgccaccagtggcgacagcctcacaatctccatcaaatgcatcatcaatttttaaagatcaacaagagggaaagggatgggaataagagaaactgaggcaaggaattagacagcaaagcagttggctcaaggtcacccagaccaagataccaagagtcgggaagaaggtatcctgacgaccccccaaaagtgctcaaaccccacccaaaggaacattcaggcccacaaacctggaagtctggtcagcttccctcactcccaagcctcacctgtttctcccttccccaaaacagacagcagctcctccatctccttttgaaaggctgctgccagaaacccccacccccagctcggggagcccactttccttaaagttggggtgctgcaggacctccttgtcccacaacatttgaggaggggggctgggaagatccccctccttgcatacttccccgcgcctgctcacctggctcccctcggcccccagggtccctcggtccagcctcctccctgggagagcgggctctgccctccgccgtcctctcccaccaggccagggcaaagcgccggaggcactgccagggctgcatggggacgcgtggggctgggggacgagcaccagcagccgcacacgccccgccgggccctgacagctgagctgcggaggcacccggcctgtcccctctgcttccaccagcatcctgctgcccccaccgacaggactcggagctggcccgggagcttctgacgtagcaggggggtgcgtgggaggggagggggggccacggtgcgtccccttcccagccccaccctccacccctcagccgcctgccttccctatcttctcactcaccctagatgccctccccagctgggggcgccctcccctgccccctggcctctgcagggggaggggttaagatcaaatagcccctccctaaacccctccctctcgtggccctccctacccgctggtagagcggggagctggtccccagtttctgcaactgctgctgaggctcagaggtctccagggctagggcctcgaggtgcggggagggggggtgtgtggaatacaggcttgtatcctggcaacgcggccaaccccagaacgcactcatccccttccctccctggaggctggcgcaaagggcccaccaccaccatcctagcccgtgcaccccattctgggagctgggggagggaggcctttgatgcacccctcacttctccatccccttcccctcccctgcatcctccacttcccccacctcggagggacgcccttctccccccaccctcctcaccatccatcccccttcttctcctcacccctcccccttccacacaagcccctttacagttgaacccctctggcccccaccccggggcgtagtgaggccctccccacccagtctcctgcctcgccaccctgcccccttctctggtcccagcactcctctcgcccgggtccttctcccaagcccggcgcacagcggtcccctgcccccacacacctgcgccccagcatccctcgccccgccggccaccgcctccccggcccggccgccgcccccgcccccggccgagggggaaaacacacaaagaaaacagaaataccttccacttaagcatggaggcacattagggaggagagagacagggacatgccttgggacggagcgttccccatcgggcgggggcgcggggggcgggggccccgggccggcctgcctggcgctcgccctctcgccgcctcgcgggctcctcgctcggccccagccccggggcgcggtgccaggcgggcgggccgggggcgcgggccccgccggggtggaccagctgggagggcgccggcggccgggcgtgtgggtgagcgcgcgcgcgggcgtgtcaccgagtgtgcgagagcgagtgtgtgtgtgtttgagtgtgtgtctgcgcgcgcgcgggccggcgcgggtgtgtcactgcgggcgggcgcgcgcgcggcgcgggcgcgcgcgtgtggccggaacttacaaagggccgcccggggcggcgggggcgggggaggggagggggcactgcgccttctcgcgccctccagcttcaccgcgtgatcccgcagcgcgcggccggggccgggcgcggggcgcgctcactctctccttcccgcgccacctgcttcgtcccaccccaagtagtcttcgcgccacgatagagacaaatacattgaccgaggaccggctcggaggaggcacccggggaagcggggacacttggagggtggaggactcctgggtctccaagcccgggcgcgcctagggatggaaaggctctcggggctgggtggggaggcggggcggcgagactgggggctcccttcagccaaggtgaccgcggaaaccaacagccgccccatgctgggagcgcccggatcctcctctgcttctgcctcgcgacccctcaccccagcgcgcctagacgcggctcggtcggagggtctgggctccccggcgccccctgctgggccgccgcctcgcccccgctccgggttgcagcccctcctgcaggcgtgcgcgggaactgcaggcaggtccgcgcccctccggccagtgagaccccaccgtaggacgctccagcgacggtccctgctcacgcctcgcttggcggcgtcactgccgcctctacttcagcccgcagagcactagctcggctccaccctgccgtcccccgcccctccgcgtcccaccttcgttggcctacctgttggctccgcagacttctccagcgctgacccggacccagacccagacccaggcccgcgccgacacctcgtgattccagcggccccctccctccctcgctccgatgctctggccagtcccttctctctcaagctttcttgcggaggagaaggtgggctgagtcccctgtcccttttatttacttctggagtttccaaaagcagtttaggtgagcaagagagtggacacagtacttctattcactgtgggccatcaggcagagtggcaggcaggcagagagcccaggagaggagaccccaccccaagtggcccaaatgacaaaccggtttccccacttcctggtctacccagttgcaaccttaatctgggctctcccaatttcctatccacccccaggcctgcccctgagccaaccacatgcccagctagggacaaggtcccagattccccttagagataaataaccaattgcagtaactcagatgccagggccaggaccagaggagaggcccttcccagctccagtgggacagatcaggaggacagccaagagctgtgtcctggacacacagtctgggcacacgaccccagcggcaggcaccctgacttcttccctcctgggccaactgcctctccctctgccaactggatggtgcccatcttttggcctctgagcgcacagtgggcatccatccagtgccctgcctggctgcctgcccaggatgggcatgggaggcagcaggctctgtgtgggggaggctcaggggaggcaagggtagcttcccctcagcacacggacaccacctcccaagcggctgggagcccagagctctggcacaggtcgctcctccgttcagattcctcacccactgactgcacaggactcctgcccttcacctgcccccaactcagattccccccaagggacaagatttcttccctcccccactttgtgcctaaggggaagaaaattagcaggtgctctaccataatctctaattttaccctttcgacagcctgatggaagtgagcattttcaaccccctatcagagagatatagccaattgcccaatgtaagagcagcaaagttgaaattcaaacccacatctgccttatgtcaaagctccctgcctttcttctatcaccatcatctcataaccctgtgggtcgccacagcagggacaacccctgggacacaaagtctcataaccatatagtcgttagaagagaactgagatcaggaatgtggctgagagttaagatgtatagccatgccataatcaggaaggagacagggatctggtcctattgtggagagagtgacctgaggcattacctctagttgacaattgaaaagatgcttgtgccatcatgtggagatttgcctgcccaaccccagtggcttggggtggggtgggaaaggttctgtgatgcagcccccagggattggaacagttccaaaggtgtcagcagaacgaagcatccatttttacccgccctaaggtgagctcgctcatcatgaaggccacctccatagtgaggagcttaaatcagatttatgtaatatttttaatttgtatagctcaccttttaatgatgaatccttagcatttctgatcatcttcatagctatcagctcatttgagacccttctgccctctcttccccaaagatgctttgtccacacccaccctgcccagctgactccatgggtctcctggaggggtgagaagggatacagctccctgaatagaacccaaggtcccaaggctgaaagtggagccagaggacagatggcctggcatcatcgcccctcattgaccccaagaaaaatacgtgcctttccctcctcccaccaggtctcaaaaggaggggttcctggtggagagagaaggctggggacaccatctccactgatcagggcaaaagcaacacaggtattacttcagctgagagatgagaattgctcctgtaagctggcatggtgcccaggcacaaccaatttgccagctgcctccacctgagatgcctcaggtgccgccccgcccccgctctcattcctcaacaggtaacttccctctggtcctcctctcctgtgcctctggcagtgtatttggtggggagggggcagctggcatgtttggggcttggaacagcagatcctaaccactcaccttgcctccccaaacatcccacccagccctcacctgttcctgggagcttgcgagagagaggttatgggggtgcaccctagaggagagaattctcagccctgcctctccttccccaagatgcaataggaacaggggttgcatctggacaaacatctgggcaggcaaagggagatgggccttggggtgggcagagaagggcatctgggcctctaggagaaggcacagggaaaaggtgacgtggaaataatggctgggacaccccaaactggtcactctgctgctttggagcacccccagcccagtatccttgagaaagcccccggtccatggggctgttgtctggccaggcatttcatgagaccccaaggaaccatccacattccactaagggtggcctgcagacagtgagggcctggggacctggtcctattctgggtcaagtaaccaggggcagtgacctagcacctggggcacaagaggggtgggggaggagccaaggaggaggagggtgcttcccgctgccccaggcctgcttctggggctttctgaacacagcctggtctcccagagcccctaagcctcccttctcacattcctcaccctcctgctcctcctcccactccataggagaggagtgagtggcagtaaatttctaaagaccctccccgcttccctgcttgttattgtaatgaatgctaatgatgctccctaactgatgccctcattagcacatcaaacccgctttctgaagaatggagacagaaagtggaggcaggttctctggggtcggagccgtagccagcctcctccagagaaccttatcccgttgcttctggcagggagggaccagcgtaggggcttggagtgaaaagccgaggtgttcccctcccagtgggaatttcctgagcacaaggctgtcttccctgtcagatggcaagggttccatctgtcccatcagactgggagctccttgagtcaggcaccttgcccccctcattaagccagggctccccctgtggtagggcagtggctctgaaagtaattggaaaagcccagttgcctggagggcatgttaaaccagcgattgctcccctcccctcaaggtctcagattcaacagatttgaggaggggcctgagaattcgcatttcttttttcttttcttttctctttttttttgagatagaatctcactctgtcacccaggctggagttcagtggctcgatctcggctcactgcaacctctgcctcccgggctgaagcgattctcctgcctcagtctcccgagtagctgggattataggcacccaccacaatgcccagctaatttttgtatttttagtagagaccgggtttcaccatgttggccaggctggtctcgaactcctgacctcaggtgatccacccgcctcagcatcccaaagtgctgggattataggcgtgagccaccgtgcccggccccaccctgacaattctttttttttttttgagatggagtttcacttttgttgcccaaactggagaccggaactggatccctgatcccctgctgtgtgccaggtccatgctcggtgctgctgatgccagtggatctcctttctctgtaggaggggagaataaccgcaagggagagggttcctagcacccacctcactctgggtgacctcccagggcctaagtggggagaggggcttgtggctacagtccataagcatgcctgcagctccccacctcctcccttcccacttggtcccttaggcataagaattgtcgggatggggccggatgcggtgctcacccctgtaatcccagcactttgggaagcccaggcaggcggatcacctgaggtcagaagttcgagaccagaccggctaatatggtgaaaccctgtttctactaaaaatacaaaaaattagttgggcatggtgtcaggtgcctgtaatcccaactacttgggaggctgaggcaggagaatcacttgaacctgggaggcagaggttgcagtgagctgagatcgcgccattgcactccagcttgggcaacaaaagtgaaactccatctcaaaaaaaaaaaaaaaaaggaattgtcggggtggggccgggcgaggtggctcatgctaggcgaggtggctcacgctgtaatcccagcactttgggaggccaaggcaggtggatcacctgaggtcaggagttgagaccagcctggtcaacatggagaaacgccatctctactaaaaatacaaatattagccgggcgtggtggcacgcgcctgtaagcctagctactcgggaggctgaggcacgagaatcacttgaactcaggaggcggaggttacagtgagccgagatcacaccactgcactccagcctgggtgacagagcaagactttttctcaaaaaacaaacaaacaaaaaagaattgcccgggtgggtgggtgagtgaactgcaaccttagtgctctagttgggggaggagggagacaggagactggagctggagtgaagagatggagggtgaggggagggggcaaacagaattgggatgaagagaagatgagaggtggagaaaaacagaagaaaagggaagaagaggggaagcaggagggagggaggggaggaaagagagaagaagagagggagggatgtatggagagatggaaagagtgaaagaaggcctttgacagggaaagggaaaagacaagaaagatgaggccagggcagggaggaggagaaggaaggtacagtctgtatctgtccttaacaggacatattatgagccactgaggcccaggtagaccacaagcccaactcctgcagggccacacccagcttgactttaaggctctagatttcaccatctgattcacatgtcttggggaaaaaaatggaagactccttccacctccagctagctgccttcccaggcctgccaaccagccttagaagactgtggtagaaggtgcagggcatggagccggtactatcctgatccgttttacccctgctagcacctagtaaccatctccttgccttccaaggttatagcaatcccctagttaatgatgaaagtaggaagaactctcgtgcattgctgatgggaatgtgaaatggttcagcagctatggaaagcagtttggcagttctttaaacatagaatgaccctatgatccaacagcccaaatgtccttcagtggatgaatggatacacaaattgtggtatatccatacaatggaatactattcatccataaaaaggaatgaagtactaatacatgcttcaacatggatgaacctcaaaaacatcatgctggctgggcaccgtggctcaggcctgtaatcccagtgctatgagaggccaaggcaggataattccttgaggccaggcgttcgaggccagcctgggcaatgtagcaagcccctatctttacaaaaaaatccccagtccccaccaaaatatcatgttaagtgaaagaagccagtcattaaaagtcatatattgtgtgattccatttatatgaaatattcagaataggtaaatccacagagatttgcctggagagacgggagaacagggagcaactgttaatgggtatgaggtttccatttgggatgatgaaaacgtgctggaactatatagagttgatggttgcacagtattatgaaagcactaaatgccactgagttgttcactttataatggttagttttattaatatactatgcaaatctcgcctcagaaaacaaagtaataatgaaagtaggagtctgccagggaattcaatgagtagaaccatctgaaaagttcagcttatcttctttggaacaaaagagcttgtgcccacatgagtcacagcctttcccggtgtgctggaacactgggcactgctctgaggactctcagaggatgctcgtaggaccttgagatgttttctggccccaggctgctccccgaagcctcttcctctgcctagccctcactccatgggggcctccctttcaggttcctgcctcccaagcaggtggcagacagttgatctgtgcttcgcatcttcagctaacatcgtgccatctgccccagtggcaggtccacccctctctgatcctttgctccgaacatagccttcaaagccctctagttttctttaccacaattttttttttttttttagtaagtgcagtgatgcgatcttggctcactgcaacctctgcctcccgagttcaagtgattctcctgcctcagcctcctgagtaactgggattacaggcacgtgccaccacgcccggctaatttttgtatttttagtagagatggggtttcaccacgttggccaggctggtcttgaactcctgacctcaagtgatctgcccacttcgacctcccaaagtgctgggagtacaggcctaccacagattgttttcatcaccccttaagtgaacctcctgctctctggaatctcacattccccacagcactctccccacatgccaggccctgggctgcctgctcagggtgcagcagagtggggaggagttccagggtgaatcaggctgttcactgctcctccctgctccaaagcttcctatagccccttctgctcaaagatcttccatggctccccattctcacaccaagggattataggaacctgaaccctttgaggtcctaacaagaattttgcattctctgtaaataaataaatgtgcccatgtacaagaaatgagtgggcctctttgacctctgcagcccatccaaggacctctaaggcagagctactcaaagtgtggtccatagaccagtgccagccactggttcacaagaatacagaaatggagagtaagcactgagaaacctttatagcgattgcctgtacatctaggcacatgaccacttttactgtattttacaaaaatatgggtatgcaatcaattggaaatttttttaaaaggcgggggtagtccttcattacagagtttgagaaacactaccctaaggaccctttcactgctgacctactcaataaattcaggctggcattccaggccctccacgaccccatcctctaatctttccagccttatttctggctacctcccacaacacacacacacccacacacacacacacacaatcttcccttcacactccatgtctttgcctatactgttcccctcccccatggggttgtcctttccttcctctgcacctgttgacacctgattctggcctcaaagcccagctcaaattccatttcctcagtaaagcctttccaaattccacccccttccttccttacacacataagcaaacacacaaacatattctagctgaactttgcactcccctgggctttcctaacacccatgtagctttctttgtggccgtctgtctcttcctagccaaggcagagctgtggtcctctctgccggtgcctcctggcctctcccgctctgggatgtccagcacctcgctgcatggattctgggcattgctatcctgatttgtaccccactcccctggcctctcctgtggttgctcctttgtgtccacccatcttctgtgctggcccctctgagctcccctcagcaaggactccatcccactccctgccccactcctgacttcacctcatcacctgggagatccgaccctctcagcaataactgctggtatatgactgggaccaaaaattagtgacatcttgacatgttaagaactgtaaaaaaaggctgggtgcggtggctcacacctgtaatcccaacactttgggaggctgaggtaggcagatcatgaaatcaagagatccagaccatcctggccaacatggtgaaaccccatctccattaaaaatacaaaaattagttgggcgtggtggcgcgtacctgtagtcccagctacttaggaggttgaggcaggggaatcgcttgaacctgagaggcagaggttgcattaagcattgagccgagattgcgccactgcactccagcctggcaacagagcgagactccgtctcaaaaaacaaaaacaaaacgaaaaaaaaaacactgtaaaaaaatactggcagggcgtggtggctcatgcctgtaatcccagcactttgggaggccgaggcaggcagatgcttgagcccaggagttccagatcagcctgggcaacgtggcaaaaccctgtctctctcttttttttttgagacagagtcttgctctgtcacccaggctggagtgcagtagcacaatctcagctcactgcaacctctgcctcccggtttcgagcgattctcctgcctcaacctcctgagtagctgggattacaggcatgtgccaccacgcccggctaatttttgtatttttagtagagacggggtttcaccatgttggtcaggctggtcttgaactcctgacctcgtgatccacccacctgggcctcccaaagtgctgggattacagatgtgagcgactgcacccggccaacgctgtctctattaaaaatacaaaaaattagttgggcatggtggcacatgcctgtagtcccagctacccaggaggctgaggtgggaggatcacttgagcctgggaggcagaggttgcagtgagccgagatcatgccactgcactctagcctagacgacagactgagactatcaagaaaaaaaggaaagaaaaaagaaagtaaaataatacattttgcttattttttattttattttattttttgagacagtgttgctctgtcgcccaggctggagtgcaatgtcccaatcttggctcactgcgacctccacctcccaggttcaagtgattctcctgcctcagcttcctgagtaactgggatgacaggtgcccaccactacacccagctaatttttgtatttttagtagagatggtttcaccacattggccaggctggtctcaaactcctgatctcaggtgatccaaccgctttggccttccaaagtgctgggattacagacctgagccactgcgccaagcccataagtgtttcaaatgaatcattatttctagttttgccctgattagtggatccatagcaaccaatcttcctcgatttggccacatttttctatttatgcgaattagccaggtgtgatggtgcacacccgtagtcccagctattcaaggggctgagacagtagggtcacttgagcccaggaggtggacactgcagtgagccatgattacaccactgcactccagcctgggcaatagagtgcgaccttgtctcaaaaaaaaaaaaaaaaaaaaaaaaaaaagaagaagaagaagaaggaagaagaagcagttcagcttcatcagagttagaaaaatgcctcaagaattctgcccaccttgagaaagagagggaaggagggcatgtttcatctgaaaagggagaaactaaaataatgatcaccgtgtgtgtgaaggaggagacaagccagggaacactctaggggtttcatgtcagcaagagagactgaaattagctctgagtgtgaacctcctggcagtgcaggagggatgatgaaggcctggcaccagggggaggatgctgggtgacttcctattcagagatcattcaaccaggattaagggtggaggcccagccaggcctgctgggaggcagaggaccggagcaggtgaccacttaagctgccatgcaagggcagagcctcgccgacagggagaggctgagaaacggattattaaggcagggtccagagctttagagtcttcaaagcaaccccataatcaaggcttcaaggaggcaagccaggattacgaataacctgttttcctgatgagaaaactgaagcccagagaagttaagaaacttgtttgaggcctcacaggtgagccaggacttgagcccagaccctcagttcttcagtccagtgagatgacccccactgccctgcctcttggggccagaagcttcccagataggacccaggcctcctttcttggtggctctgtgaacttccttaggccttctgcacccccacacccccatgccaccctctccaccaacaccccagccacacagccccagaacagggcagggaccgcggggagaggctgcaaatccctctcctaacaactgaactgagggaggaaggaggtgggaacaggtcccaaacttccatctcacttgtcctcgcccgtctccgtctcagactctcgtgataggaaagtaggccagtttggaatatgtcacggatattttcaacaaccccatctgtactatagcttcgcacacagcctaccggggtggagccagaggcttcctgccggatgaggaatacacctgctacctctggggctcagagcccagatgggggctggggacgtacacaggggactctgaagggccaggcatccagcagtcagggtagggcgggacaggagaccagctgtgtctgtcctcttcccagagcagcgggagcagaacagctgggacctacagacaccattccactgccctgcgacagtgtgccctcccagcctgtgggtggggcactgaggaaggagcaatcagtcctcagggaaagggatctggaaaagctttatgacagaggtggctgacatctgagttgggccttgaaagcaaagcagggttttgctgagtggaaaagaggaggagggtgtctctggccaagggagaatgttgagaaagctggggccagcgcgccggggccagcgtgcgggagctggtatggcttgggggtagagggctgcccagggagtggcagcaggagaggctgggaggtggcaggctagcgttggaggagctgtgaatggtggatgcccagctaaggagcttcaggtgggccctgcaggtgcccacggaggcttttaagtgatgtgattcaggaagaacatgtagctatgggcaggaaggagtcaacttgggaggggcagggatgcagaggttgagtgagtgtcccttctggacaccagacaccctgaccacatccttctccagtccactagcagggtaacctctcctgactggggagagaggccaatgtaagaaataaattccttgtaaaagtattagtgacagccaggtgaggtggctcacgcctgtgatcccagcactctgggaggccaaggcgggcagatgacttgagcccaggaatttgagaacagcctggacaacatagcaaaatcccatctctacaaaataaaatgcaagaattagccaggcatggtggtctcagctactcgggaggctgaggtgggggtatcacttgagcccaagaggccaaggctgcagtgaaccatgatcataccactgcactctagcctgagcaacagagcaagaccctgtcttaaaaaaaaaaaaagagagagagagagagagagatagagatgatagaggcttactagctcaaggggaccaaggtcaggtcagggatgcatttcaggggattcacctggaaaggctggcccaggggacacccacatgcttttgtttactaagcaccacctgctataggcacttggcagcatggccttatttaaccttacaacaaggccaagtggtgcacatgcttccctcctttctattgatgtggaaacagaagctcaggaagttcgggtcccatccccaaagtcccacagtttgtaagtggcataagaatttggatccatgtgtctccagagcccagtacattcccttcatctcttttttgtttgtttgtttgtttttgagacggagtcttgctctgttgcccaggctggagtgcagtggcacaatctcggcgcacggcaagctccgcctcccaggttcacgccattttcctgcctcagcctcccgagtagctgggactacaggcgcccgcctccatgcccggctaattttttgtatctttagtggagacagggtttcaccatgttggccaggatggtctcgatctcctgaccttgtgatccacccgcctcagcctcccaaagtgctgggattacaggtgtgagccaccgtgcctggccctatccccttcatctcttaccacctcccagaacagagccacgactcccttccaaagaagggccccaacctttaccccctctcactgtctctacccagatccagggctccagggccccatggcaaccccacaaccctaactacactcagataaagaaactgaggccgagcaatggctcatacctgtaaccccagcattttgagaggccaaggtgggcagatcacttgagaccaggagttcaagaccagtctggccaacatagtgagaccccatatctcctaaaaatacaaaaattagctgggtgtggtggtgcctgtaatcccagctacttaggaggctgaggcaggagaatcacctgaacccagaggtggacgttgcagtgagccgatatcgtgccactgcccagcctgggtgacagagtgagactctgtctctaaaacaaaacaaaacaaaaagaaacaggttcagaagcatcaagtgacttgcccgacgacacaagttaatttgtgacgtaggcagaattcagagccagatcccttctcacacctacccactctgcctttcagccctgtgtctctggcagtttatttggtcgggagggggcatctggcatgtttgagagcgctcagcctctgtgtttcccagtttcttcatctgtaaaatgggcctgggagggttagtgagagtgcacaggtacaagtcactcagcacagtgactggtatgcactcaacactcaacaaatatttattgagcaactactaggagcaagatcatctttcagtggttggggcacaaccagaaacagaaataatctgctcttccaaagtggatattaagatgaggattgagaggagaatgggccagaggcacagggaatgtgccccataaatgctcccactgagtcccaccttctggctgtgggagcttgagcaagtctctctggtgtgctctacgtgtggatctagaaattgggaagaaggcggaagaagctccccactgtgtagccgctatgtattactatcactgccagcctctgtggtgagcagccctgttccaacccctgtgagaccagcaaagcccttcccaaccctgctctgtttttggccacatctgggtcaggcagacgggtgcacgctttgccttctgttccctcccttccaggacccacagctctgctccttgtcctgttgcagactcacagctgcccagcccccgtccaggcccagccctgaatccgacgcaagcatcctgtcggaggctgtaagggctggtgttcaggggacacctttgaggccctgatgctgccctgagcgtcgggctccaactccttacttccaagggttgggctgcacttctggccaaaatcaaggagctcctcacagaaagacaaggaaatcaaggtctagctctaggaacataaaataatcatagttggggtaattcttaagcacttaggatattattttatttagttccatctgcgagtataaaaccccattttagagttgataaaactgaggctcagaaaagtgaagtgacttgcctgaggcatccaaagcccctctcttctttacttccagattgatggaaacacttggctctgaatccctggactgtgtgtccaacttccaggccgtggctggactccagtccccaagtgtaaccagaggcaggggatctgggaccccaggactggggagaaagagtctggcacctccccatggctgttgcggctcacattgtccctttcaggaacagctgctgctcagtctccttcacccccaacctcagggtcaggaagtggggccaccgttgggaggtgggatcaggcccttcctaggtccccatcgctgtttccaaaacatcattctgttactttcttgcaaaagcctctgctctatccatctgtgccaccctcaccgtgccacctacagtggccttgtccattgaactcgcaatactgcctctatttgttgaagccttttgacatcccaattcctagcatatcctgggtaacttcaaagcctcagcctctcagtgctgtgaccttcacatgcctgatcactttccactgtacccatagccttgtttccatctagacactgttaccatctgtatgtgctcatattttcctctctggagcatcgtccactccctctattcaactattcgtcatacaaccgttcttcaatctcccaccaactgatccagaggtgcattccccatccatcagttcccttctgccttcactcttttttttttctttttaatgaggcagggtctcactctgtcaccgagactggagtgcagtggcgagatcttggctcactgcaatctccgcctcctaggctcaagcaattttcctgcctcagcctcccaagtagctgggattacaggcatgcgccactaccacccggataatttttgtatttttagtagagacagggtttcaccatgttggccaggctcgtctcgaactcctgacctcaaatgatccacctgcctcagcctcccaaagtgctgggattacaggcgtgagccaccgcacccggcccactctttcttctcttgtcagcccagagtccctggtttgtcagatcatcttaactccccacactctgtattttggggttacacttccctgacaaaaccctaacatttagacttctgattcaagatggttacccttaacacgtatgtttgcccctccatcctggacaatccctttgaaatgacacaaaaaaatatcctggggttttaaaacaggcttgatttactgatagcacaacctaacagagaaggaatctatgacatcatagagggctccactaagagagtgaattttccccgaagagccctagacttgtgtctcagcatgggaataaggcagggatgtccacccccatcatccctagtcagcactgtagttcagccagtgcaagaaaggggaaaagacatcagatttgaaaggcagcagcaaaatgatcattatttacagatggcatgaatttctatgtaaaaaatctgatggaatttgttaaatggctattacaactaataagtaagtttaacaagattgtaggagataagatcaatatataaaaatcgattacatttctatatactagcaagtgaactattggaaattgaaattaaaaaaaaaaaaactctgtatagtagcatccaaaaaatatgaaatatttagggataagtctgacaaaggatatacaagacttgataccagaaactatgaaatttgcttagaggaattaaagacctgaatatcatccctagtcagtgttgtagttcagccagtgcaagaaagggaaaaagacatcagatttgaaaggcggcagcaaaatgatcattattcacagatggcatgaatttctatgtagaaaatctgatggaagctgggcgcagtggctcacgcctgtaatctcagtactttgggaggccaagactggcggatcgcctgaggtcagaagttcaagaccagcctgggcaacatggtgaaatcccctctctactaaaaatacaaaacttagccagaacagtggcacatgcctgtaatcccaactactcaggagggctgaggcaggagaatcacttgaacccgggaggtggaggttgcagtgagccgacatcacgccactgcactccagcctgggcgatagagcgagactctgtttcaaaaaataaaagaaagaaagaaagacaaagaagaaaagcacaagggatttagaatagtcagaacaattttggaaaagaaggggaaaaattggaggacttacactatctaactttaagatgattataaagcgacggcacaatcaagacagtgtcatattggcatcaagatgggcaaatagatcaaggcttgtaaacagatccatgcacatatgttcaactgattttcaacaaagatgtaaaggcaatctagtggaagaaagactgtcttttcgccaggtgcagtggctcacgcctgtaatcctagcattttgggaggccaaggcagttgggtcacttgagctcaggagtctgaagccagcctaggcaacatggtgaaaccctgtctctaccaaaaatacaaaaattagccagtcatggtagcatgcagctgtggtcccagctacttgggaagctgaggcgggaggatcgcttgagcccaggaagtaggctgcagtgagctgtggtcatggtgctgcactccagcatggacaacagagcgagatcctgtctcaaagaaaatataaataaacagtaagttagctggttgttgtggcacgcacctgtagtcctagctactcgggaggctgaagcaggaggattacttgagcccagaagttcaaggctgcagtgagctacaatcacaccattacactccagcttgggtgcaagaacaaaaccttgcctaaaaaaaaaataaaaagaaaaaagaaaaggttgggtgcggtgggtcacgcctgtaatcccagcactttgggaagccgaggcgggcagataacctgaggtcaggagttcaagaccagcctggccaacatggtgaaaccccatctctacaaaaacacaaaaattagccgggcatgatggtgggtgactgtaatcctagctacttgggaggctgaggcaggagaatcacttgaactcgggagacagagattgcagtgagccaagatcacgccactgcactccagcctgggcaacagagcgagactcggtctcaaaaaaaaaaaaagagaataaaaaagcaagccagactgggaaagaatatttgcaagcatatatggataaaggacttttatccaggatatataaagaactctaaaatcccaataataagaaaacaaacaacccaatatttaaaatgggcacacggaggcaggggcaatggctcacgcctgtaatcccagcacttggggaagccaaggcaggtggatcacccgaggtcaggagtttaagactagtctggtcaacatggcgacaccctgtctctactaaaaatacaaaaattagctgggcgtggtggtgtgcgcttgtagtcctaaacactctggaggctgaggcaggagaatcgcttgaacctgggaggcagaggttgccgagatcgtgccactgcactccagcctgggtgacacagtgagactccttctcaaataaataaataaataaataaataaataaataaataaataaaatgggcacaagagccgggcacggtactcgcacctgtaatcccagcattttgggaagccaaggcagaaggattgcttgagcccagaagttagagaccagcctaagcaacataatgaaaccctgtctctacaaaaaatgtttaagctgggcgcggtggctcatgcttgtaatcctagcactttgggaggctgaggcaggtggatcacctgaggtcaggagttcgagaccagcctggtcaacgtggtgaaaccccgtctctactaaaaaaaaatacaaaaattagccggacatggtggcaagcgcctataatcccagctactggggaggctgaggcaggagaattgcttgaacccgggaggcggaggttgcagtgagctgagatcgctccactgcactccagcctgggtgacagagcagtagtctgtctcaaaaaaaaaaaaaaaaaaaaaagtttaaaaaactagctgaccgctgaccactgtggctcgcgcctgtagtcccagctacttgagaggctgaggtggaaggatcccttggaagtcaaggctgcagtgagccacgattgcaccactgcactccaatctgggcaacagagcaagatcctgtttcaggaaaaaaaaaaaaagcgcaagattttggatacttcaacaaagaagaagatatgcagatggatatggaaagagacccatcactagtcattagagaaatgcaaattgtggtttcacaatgagacatcactattggaataccacagtatcaagcgctggtgagaatgaggagaaaatgaaactcatacgctgctggtgggtatgtaatatggtacgaccactttggaaattagtttggcgggggttttttttgtttgtttgtttgttttttgtttttgtttttgttttgagacagagtctcgctctgttgcccaagctagcgtgcagtgacgcaatctcagctcactgcaacctccacttcctgtcttcaagcaattctgcctcagcctcccgagtagctgggaccacaggtgcctgccaccaagcccagctaatttgttttgttttattttgagacggagtcttgctctgttgcccaggctggagtgcagtggtgcaatttcggctcactgcaaactctgcctcctgggttcaagcgattctcctgcctcagcctcctgagtagctgggattacaggcatgcaccaccacgccccgttaatttttgtatttttagtagagacggggtttcaccatgttggccaggctggtcacgaactcctgacctcaagtgatgcccccacctcggcctcccgaagtgctaggattacaagcatgagccactgcacccggccacataataaaaaattattatgctggatgaaagaagaaaaatgaaaaagaggagtatctactgtatgactgcatcaagaaaatgcaaactaatctatagggatggaaaacagatcaatggttgcctagagatgaggggagagttgggggagcaaaggggcatggggaaacttttggggtgataaatatgttcattatcttgacttgatggctttgaggatatgttcatatgtgaaaacttatcaaattgtacattttaaatatgtgtagtttattgtattgtcaattgttcatcaataaagctataaaaaggtaaataaaaagaagcaagaatcaaataaaagagttagtctaagaaaagaaatgagatataaatactacaaaaagagcaaaatcatcactacatgcagattacattattgtctagttagaaaagtcaaagattcaactgaagccatttagatcacatcagcaggttcagtaagatggccaaaagaaaaatatacaaaaatcaatagttttcttttttaccaagcaaaaacaattttaaaatgttagaaaaaaattatctaattcgtgatagcaattgaagctatgaaatacccaggaataaactttacccagaacatacaagaagacctgaataaacagagagacctatgccatcttctcaaaatggaagaacactccggaaaagctctcaattttcccccagattactctataaattcattgcaactccagtttaaatttccagtggaattatttaaccaaaactagagaagataattctaaaattcatctggaagagtaaatgggtaccaagaacaacaacaacaaaaaaagtagttaaaaataaggataatggaccaggtgggaattacttccattaccactaatccaaatgtaccataaaacaattattattatagcaagcatggatttgttttcctagttcacaaatatttacgaaataaccaagtaaatgaataggcaaacagaacaatagaatgcatcatacagagacagtctccaaaacgtttttcatgtagtgaatattttagcataaagacttatcatgtatttctattatttttatttattttttttatttttttattttattttattattattatttttttgagacggagtctcactctgttgcccaggctagagtgcagtggtgcaatctctgctcactgcaacctccgactccttggttcaagtgattctcctgcctcagcctcccaagaagatgggattacaggtgcccaccaccatgcccggctgattttggtatttttagtagagatggggtttcaccatgttggccaggctggtcttgaactcctgacctcaagtgatccacccgcctcggcctccaaaagtggtgggattacaggcttgagccacctgtatttaatgtatttctattaaatatgtcctggatatccatgagtccctcaaaagcaacatgccccagattgacctaccttcttattcatgcacctcttcctactccacagttccagacaatcactcaaccaggaaaagtagtcaccctggatccctccttttcctcccactcactctctcattcagttttaccttttaagatatttctcaatctccacctcccaccacatggaaatttagcacatgataaaaacagcatttcaaactagcaaggaaaagaaaccgtgctggaataagtggctatccatctatgaaaaataaatacttaagtcagatctatacataacaatgaattccagatggattaactaagtacataaataactacaaaagcaccaggaagaaatacaggagggtttggttttttttgtttttatttttttatttttttgtttgttttgttttaatcagacagtgccagaagaaggagaacattttttgtaatttggggataagaaggactttcataagacatgaaattcataaactataatgaaaaatatcaaaagatttgattacagtaaaagacaccataaagtaaaaaaagggaatgctaggccgggggcggtggctcacacctgtaatcccagcactctgggaggccgaggcgggcggatcacctgaggttaggagttccagaccagcctggccaacgtggtaaaaccctgtctctactaagaatataaaaattagctcggcgtggtggaacatgcctgtaatcccagctactcaggaggctgaggcaggagaatcacttgaacccgggagtcagagggtgcagcgagccaagatcgtgccactgcactccagcctgggcaacaaaagtgaaactccatctcaaaaacaacaaaaaagtgaatgctaaagtaggagttttgcaatatttaaagcacagatagagttacctgctaattattatccctaatatacaaaaggatcctacacatcagtaagaaaagatcagaaaatccaacaggacaaagggcgaaggtaatgacaggacaatttatgctttttttgtttttttgagacagagtctcagtgtgttgcccaggctgaagtgcagtggtgtgatcatagctcatggcagacttaacctcctgtgctcagcctctcaagtagctagaactacaagtgcacaccaccaagcctagctaatttttagtatttttattttttgtagaaacagggtcttgctatactgcccaggctggtcttgtattcctgggctcaagcaaccttcccacctcagcctcccaaaatgttggaattacaggcatgagccactgcacctggtagagatacatttttgtccattaagttggtaaaaaattaatgcaattgataatgtttggtgttcacatgagcgcagatacaagggaactctcaaacattgttgacgaatatacaaaacaatacgacagtttgggaggcaattgatctgtactcaccaaaatgttaaacaaaccctttgagaaagctactcctttttagtaaaaatctgttgttttagctttcccagcacccattaccccttcagaattctggcaactgcccttccctcaccccagattgtctgcagaaccacttgtctcctactgtccagcaagcagtttgctggggctggctccgcctcccagttgcgggggtgagttctgtgacttaaacttgcccaatcagtgtattccatcccccacctcaagcaaagtgattggtttagggcaggacatgtgatctaagtgagagccaaattagagaccgccctgtgacttttccagcctcccagagaagagcaggtggagtgtggccatcttgactttccatgcaagaattgatctgagaatgaagccaaaacaaaggaaatccaagtgctagtgagagattatgaaggcaaaatttgggcacctggacccagctatacttgaattcagctgtccctaggaattgagtgatatgagccaataaaacaccctccatggccaggcacagtggctcacgcctgtaatctcagcactttgggaggccaaggtgggcagatcatttgaggtcaggagtttgaaaccagcctggccaacatggtgaaacccccatctctactaaaaatacaaaaattagccgggtgtggtggcacgcgcctgtaatcccagcactttgggaggccaaggcaggaggatcgcttgaggccaggggtttgaaaccagcctgagcaacttggtgaaatctcatatctacaaaaaatacaaaaactagcctggcatggtggagtgtacctgtagtcccagctactcaggaggctgaggtgggaggatcacttgagcccaggaggtcgaggatgcagtgagccgagatcacactgttgcattgcagcctgggcaacagagaagatcttgtctcaaaaataataaataaataaataaataataaaatacttgagggggaaaaagtttcttagaaccatgtggaaatactacttcttttttgttttgtttttattttgtgtttgtttgtttttgagacagagtctagctctgttgcccaggctggagtgcagtggagcaatctcggctcactgcaatgtccgccttccgggttcaagcaattctcctgcttcagccttccaagtagctgggattacaggcatgcgccaccatgcccggcttatttttgtatttttagtagagacggggtttcaccatattggccaggctggtcttgaactcctgacctcgtgatctacctgtgtcggcctcccaaagtgctgggattacaggtgtgagccaccacacccggccttcgtttttaattttaaaatacaccaagacccgcagtggatacctgaaactgcagatataccaaatcatatatgtactatgttttttcctgtacatgcaaacctatgacaaagtttaattttaaaattatgcacaagaggctgggcacagtggctcacgcctgtaatcccagcactttgggaggctgaggctggtggatcacctgaggtcaggagttcgagatcagcctggccaacatggcgaaaccccgtctttactaaaaatacaaaaattagctgggcgtggtggcacatgcctgtagtcccaccttctcaggaggctgaggcaggagaatcccttgaatctaggaggcagaagctgcagtgagccaagattgcaccactgcactccagcctgggcaacagagcgagactccatctcaaaaaaaaaaaaaaaggcacaaaaagagatttacaacaattaataaaatagcacccctccccctccccctccctctccccaccgtctccctctccctctctttccacagtctccctctgatgctgagccgaagctggactgtactgctgccatctcggctcactgcaacctccctgcctgattctcctgcctcagcctgccgagtgcctgcgattgcaggcgcgcgccgccacgcctgactggttttcgtatttttttggtggagacagggtttcgctgtgttggcggggctggtctccagctcctaaccgcgagtgatccgccagcctcggcctcccgaggtgccaggatggcagacggagtcgcgttcactcagtgctcaatggtgcccaggctggagtgcagtggcgtgatctcggctcgctacaacctccacctcccagctgcctgccttggccccccaaagtgccgagattgcagcctctgcccggccgccaccccgtctgggaagtgaggagcgtctctgcctggccgcccatcgtctgggatgtgagtagcctctctgtctggctgcccagtctggaaagtgaggagcgtctctgcccggccgcccatcgtctgagatgtggggagcgcctctgccctgccgccccgtctgggatgtgaggagcgtctctgcccggccaccccgtctgagaagtgaggagaccctctgcctggcaaccgccccgtttgagaagtgaggagcccctccgcccggcagccacaccgtctgagaagtgaggagcccctccgcccagcagccaccccgtctgggaagtgaggagcctctccgcccggcagccaccccgtccgggagggaggtgggggtcagccccccgcccggccagccgccccctccggaagggaggtgggggggttagccccgcgcccggccagccgccccgtccgggagggaggtggggggggtcagccccccgcccggccagccgccccgtccgggaggtgaggggcgcctctgcccggccgcccctactgggaagtgaggagcccctctgcccggccagccgccccatccgggaaggaggtgggggggtcagccccccgcccggccagccgccccgtccgggaggtgaggggcgcctctgcccggccgcccctactgggaagagaggagcccctctgcccggccagccgccccgtccgggagggaggtgggggggtcagccccccgcccggccagccgccccgtccgggagggaggtgggaaggtcagccccccgcccggccagccgccccgtccgggagggaggtggggggtatcagccccccgcccggccagccaccccgtccaggagggaggtgggggggtcagccccccacccggccagccgccacgtccgggaggtgaggggcgcctctgcccggccgcccctactgggaagtgaggagcccctctgcccggccagccgccctgtccgggagggaggtgggggggtcagccccccgcccggccagccgccacgtccgggaggtgaggggcgcctctgcccggccgcccctactgggaagtgaggagcccctctgcccggccaccaccccgtctgggaggtgtactcaacagctcattgagaacgggccatgatgacaatggcggctttgtggaatagaaaggcgggaaaggtggggaaaagattgagaaatcggatggttgccgtgtctgtgtagaaagaggtagacatgggagacttttcattttgttctgtactaagaaaaattcttctgccttgggatcctgttgatctgtgaccttacccccaaccctgtgctctctgaaacatgtgctgtgtccactcagggttgaatggattaagggtggtgcaagatgtgctttgttaaacagatgcttgaaggcagcatgctcgttaagagtcatcaccactccctaatctcaagtacccagggacacaaacactgcggaaggccgcagggtcctttacctaggaaaaccagagacctttgttcacttgtttatctgctgaccttccctccactattgtcctgtgaccctgccaaatccccctctgcgagaaacacccaagaatgatcaataaaataaataaataaataaataaataaaataaaataaaatagcacaattataacaatatacttattgtattcctcctacctgttttcagaactcgattgaccttgggtaactaaaactgtagaaagtgaaactgtgaataaagtggaactactgtatgtctatgcatacaaaaaggtctggaaatatagacagacacacacatccccacaccctcacacacacacacacacacacacacacggacacacacactattagcagtaattatccctaagggagtggcaatgggagccaaaggaatccactgttgtgtgttttttgtgttttttgtttgtttgtttgttttgagacagagtctctgtcacccaggcagtgcagtggtacgatctcagctcactgcaacctcctcctcccggattcaagtgattctcgtgcctcagcctcccgtgtagctgggattacaggtatgagccatcacacctggctacttttttaatttttagtagagacgggttttcaccatgttagacaggctggtctcaaactcctgacctcaagtgatttgcccgcctcggcctcccaaagtgctgggattacaggcatagtcactgcacccagccccaaaggaatccacttttaatcctatacacatctttatgatttgaatttttcttttcttttttgtagagatgggatcttgctgtgttgtccaggcttgtcttgaactctaggcctcaagtgatcctcccgcctcggcctcccaaagtacttggattacaggcatgagccaccatgcccagcttgaatttttctaaagagcaatgaattattcattcaacaaatatttaaataggacctgtcttgaccaatcactgttctaggttaaggccatagcattaaacaaaacggacaaaatccttgctttcatgatgggagggggcatcaatatattttaaaaatgatatctaggtggggtgcagtggctcacgcctgtaatcccaaaaattttggagaccgaggcaggcggatcacttgaggtcaggagttcgagaccagcctggccaatatgggaaaaccccatctctactaaaaatacaaaaaaattaggtgggcattctggcacatacctgtagtccagctacttgggaggctgaggcaggagaatcgcttggagtcaggaggcggaggttgcagtgagccaagatcatgccaatgcactccagcctgggtgacagagtgagactccgtctcaaaaattaaaataaaataaaatgttaaaaattgatgaacccaactcttggcttttatcgtgcctgcatccgggcagctgagtatcactagagaaaagcacatagctgagaagactgggaccaaagaaaatggtggtcctcgatgttatatggaacctgaatgtggcttgacaatcctggctatgcttcagtgattaactccctacctgctcttcaaagtgacaacttctaacatctcccattctccttccttaaactgtttaaaagagtgattgctggggccaggcccggtggctcatgcctgtaatccgagcactttcggaggccgaggtgggtggatcacgaggtcaggagttcgaaaccagcctggccaagatggtgaaaccccatctctactaaaaatacaaaaattagccgggtgcagtggtgggcacctgtaatcccagctattcaggaggctgaggcagaagaatcgcttgaacctgggaggcggaggttgcagtgagccaagatcataccactgcgctctagcctgggtgacagagcaagactccttctcaaaaggagtgattacaattgtcattaggactattctgtgtctctgccttctgggcacaaagcaagatgctatttcccttaaagttagaatggtcggccaggcgtggtggctcacgcctgtaagcccagcactttgggaggctgaggcaggcagatcacgaggtcaggagatcaagaccatcctggctaacatggtgaaacctcatctctactaaaaatacaaaaaaaaggtagccgggcgtggtggcgggagcctgtagtcccagctacttgggaggctgaggcaggagaatggcatgaacccgggaggcagagcttgcagtgagccgagattgcaccactgcactccagcctgggcgacagagcgaaaaaaaaaaaaaaaaaagttagaatggctacgcaacttcatttggtcaacgaaagttggacagaagtgatgtgtgttacttccaggtcaatgcttttttaaaaaaaatcagtagttttgggggtgcaagtggtttttggttacatggatgatttatatagtggtgaagtctgagattttagtggacccctcaactgaatagtgtacactgtacccaacacatagttttttatccttcaccccgtacccacccattctgcttcttagtctccaaaatccattatataatttttttttctttttttcagacggagtctcgctctgttgcccaggctggagtgcaccggtgcgatcttggctcactgcaacctctacctcctgggttcaagcaattctcctgcctcagcctaccaagtagctgggattacaggtgcccgccaacacacccggctaatttgtcttcatttcttcatctcctactttataacgccctccacgctggtgccaccccactaactccattcaaactactcttccttaggctgtggcatacctgttttagtccttacctaataggacctctcagcagcatagagcagttacccatttttctctttacaaaaacactctcggccaggcacagtggctcgtgcctgtaatcccagcactttgggaggccgaggtgggcagatcacctgaggtcgggagttcaagaccagcctgaccaacatggagaaaccccatctctactaaaaatgcaaaattagtcaggcgtggtggcgcatgcctgtaatcccagctactagggaggctgaggcaggagaatcgcttgaacctgggaggcggaggtttgcagtgagttgagatcgcaccattgcactccagcctgggcaacaagagcgaaattccgtctcaaaaaaaacaaacaacaacaacaacaaaaaaaacccacactctcttcccagcttctaggatactgtactttgttttttgttttttgtttttgttttgagacggagtctcactctgtcacccaggctggagtgcagtggcatgcttttgcctcactgtaacctccacctcccaggttcaagcaattctcctgcctcaccctcctgagtagatgggattacaggtgtgtgccaccacgcctggctaatttttgtatttttagtagagacagggattcgccatattggccaggctggtctcgaacttctgacctcgtgatccgcccgcctcggcctcccaaagtgctgggattacaggcgtgagccaccgcgcctggccaggatactgtactttcttggtttccttctcacaacctctctgactacttcttctcagtctccttggctcaacccaactatgaaatgttcctcagttttttgtcctaggcctgtttctatcctcactccctgacactcccatggccttaattaccacccatattttagcaggtcccaattaatatctccagctcagatagaaattctagtcctatatattgaattgcataccaggactttctccactaggttgtcaactagtccaaaactgatctcattatctttccccttagttctgtttctcctcctgggttttttaaataaatactggtgccatccaccaaacctcttaaaccagaaataggagagtcttccttgattctttactcttgcactctataccctaaagcaggagtccccaacccccgggccacagactgtggcctgttaggaacagggccacacagcaggaggtgagtggctggcctgcattcccgcctgagctccgcctcctgtcagatcagcggcgacattagattctcataggagcagaaagcctactgtgactgcgcatgcaaggaatctaggttgcatgctccttctgagaatctaaataatgcctgaagatccgaggtggaacagttccattccaaaaccaccccccatcgcttctcggccttttggctaaaatcaagtgtaaagccacctcccaccccaccatctgtggaaaaactgtcttccacaaaaccggtccctagtgccaaaaaggttggagaccactgttctaaaggtaatcagtaagttttttttttttttttagacagagtctcgctctgttgcccaggctggagtgcaatgacacgatctctgctcactgcaacctccacctcctgggttcaagcaattctcctgcctcagcctcccaagtagctgggactacaggctcatgccaccacacccggctaactttttgtatttttatagagtagcgggtttcatcatgttggcgagactggtctcgaactcctgacctcaagtgatctgcctgcctcggcctcccaaagtgctgggattacaggtgtgagccactgcgcctggtcacaatcactaagttctatttttcctacctcccaaatatctagtttgttcacatctccttatcttcaccaccatgaatctaattcaggatgccagtttcactcacctggacagctgctccgatctcttaactggtttccctgcatctgtgcgtgtgttcttccagtcagatcttcatactgcaaccagagagagacctttgcaaatacaggaacaaataggaaacaaatagaatatggtaaattaaacccaactctattagtatttacatgaaatttaaaggggctaaatcctctaattaaaagaaaaaagatgtcagactgcattaaataatccaattatgtgctgtttacaagagccacatcttcaatataaggatgcagaaaggttaaaattaaagggtgaggcctgggtgtggtggctcatgcccgtaatcccagcactgtgggaggccaaggcaggcagatcgctttgagctcaggagttgaagaccaacctgggcaacatggcaaaaccccatctctacaaaaaaattaaaataaataaataaatactacaattaaaggatgaaaaaagatataatgcaagcgctaaccaaaataaagttgtagctatattagtatcagacagagtaatctttagggcaagaagcattactaaaaacaaagaaggaactgggcagggtggctcatgcctgtaatcccagcattttgggaggccaagacaggtggattgcctgagctcaggagttcgtgaccagcctgggcaacatggtgaaaccccgtctctactaaaactacaaaaaaattagccaggtgtggtggtgcacgcctgtaatcccagctgcttgggagactgaggcacgagaatcacttgaacccaggaggtggaggttgcagtgagccgagatggtgctgttgcactccagcctgggtgacagagtgaggctctgtctaaaaaaacaaacaaccaaaaaaagaaaaacaaaaaagagggacatttcacgataataaaagggtcaattcaacaggaagacataacagttctaaatactcatctgataatataacctcaaaatacataaagcaaaaatggacagaattaatgaacaggccaggcatgttggctcatgcctgtaatcccagtgctttgagaggtcaaggtgccaggatctcttgagatcaggagttcaagaccagcccaagcaacatagtgagaacctcatctctacaaaaaactaaaaataaaaataggtaggcgtgatggcatgcacttgtaatcccagctacgcaagaggctgaggtgggaggatccttggagcccagaattcaaagctgcagtgagccatgatcatgccactgctttccagcctgggtgacagagcgagaacctaactcaaaaaaaaaaaaaaaaaaaaaaaaaaaaattaaagaagaaataggcaaatccccaaaattcccaatcatagttggagatttttgacacagctctcccagtaactgatagacaagtcgattttttaaaagtcagtagaggatttgaacaatgtaattaaacaaatttccctaactgacatttataggatattattttaaaaaccaggaggaaaccaacaactacagaaggcacatgcttctcaagtaccaattttgacacttaacaaaattgaccatatgctgggccataaagcaagtgttaacgaatttccagttcctgaaatcatgcatagtatgttctctggactcagtgaagttgagctagaagtcaataactaaaagataactagagaattctccccaaatattcaaaaattaattaataagcctctaaataggccatgggggtcaaagaagaaaccaccatggaagttataaagtattttgaactgaatgataatgggatattgcccaaaacatgtttaaggagaaatgtatagacttaaagtcatagaagaacaaaaattaatgatttaagaatccattaaaagaaatttttagaagaagagcatttaacactccccttcccccaaaagtagaaggaacaaaatgttaaagataagagaagaaatcaataaaataggaaacaaatatagaatggagaaagtcaacaaagacaaatactggttctttggaaagatctctaaaattactaaagacctctaaaagtaataaagagcaggaaagattaaggtaaaaagagaaggagggaaggagatcacaagtaacaaatattagaaatataaggccaggcacggtgactcacgcctgtaatcccagcactttgggaagccgaggagtggatcacctgaggtcaggagttcaagaccagcctggccaacatggtgaaaccccatctctattaaaaatgcaaaaaattagctgtgtgtggtggcaggcacctgtagtctcagctactggggaagctgaggcaggagaattgcttgaacccaggaggtggaggttgcagtgagccaagatcgcgccattgcactccatccagcctggatgacagagagagactctgtctcacaaaaaaaaaaaaaaaaaaaaaaaaaaaacaaagaaagaaaagaaaagaaagagagaaagaaagaaagaaagaaaaagaaaataaataagaaataaaaaaggaaacattactatagaccctacagatgttaaaaagataatagcaggatattataaacaactttacatcgacatttgaaaattgagataatatgggcaaattccttaagagaaaacacaaagtgtcataagaatatttaaaaattttataagaattttctgatttttgagatcacaatacacctatatctgttaaagaagttgaaggtcgggcgaggtggctcactcctgtaatcccagcactttgggaggccaaggcggctggatcacaaagtcaggagttcaagaccaatctggccaacatggtgaaaccccatctctactaaaaatacaaaaattagccaggcgtggtgtcaggtgcctgtaatctcagctacacaggaggctgaggcagagaattgcttgaaccgaggaggcagaggctgcagtgagctgagatcgcatcactgcactccagcctggacaacaaagcgagactccgtctcagaaaaaaaaaaaaaaaaaaaaagttgaattaatttaaaatcttcctggccgggcaaggtggctcatgtctgtaatcccagcactttgggaggccgaggtgggcggattacctgaggtcaggagttggagaccggcctggccaacatggtgaaaccctgtctctactaaaaatacaaaaattagctgggcatggtggcacacacccgtaatctcagctactcaggaggctgaggcaggagaattgcttgagcgcgggaggcaaaggttgcagtgagccgagatcatgccactgtactccagcctggccaacagtgagactctgtctcaaaaaaaaaataaaaataaaaataaataaataaaataaaataaaataaaatcttcccctagagaaaacttcaagctcgggcaggttcactgaggcaattcttccaaacatttaaggaagaaataataccatcttatacaaactcagaggacagagtaaaaaggaacacttcccaattcattttatgagacttgcataactgtaataccaaaagctgacaaggatagtacaaagaaaggaaagtcacaggccaggatctctcataaatgtatatacaaaatcctacacaaaatatagcaaacgaggctgggcacagtggctcaggtctgtaatcacagcactttaggaggctgaggcggatggattgcttgaggtcaggagttcgagaccagcctggccaacatggtgaaaacccatctcttctaaaatataaaaattagctgggtgtggtggtgggcacctgtaatcccagctactagggaggccgaagcaggagaattccttcaacccaggaggtggaggttgcagtgagccaagatcacgccactgtactccagcctgggcaacagagcaagattccgtctcaaaaaaaaaaaaaaaaaaaaaaagacaacaacaaagccaggcgcggtggctcatgcctgtaatcccagcactttaggaggccgaggagggcggatcacctgagatcgggaatttgagaccagcctgaccaatatggagaaaccccatctctactgaaaatacaaaattaactggatgtggtggcgcatgcctgtaatcccagctactagggaggctgaagtaggagaatcgcttgaacccgggaggcagaagttgcagtgagccgagatcgtgccattgcactctagcctgggcaacaagagcgaaaactccatctaaaaaaaaagaaaatatatatatatctcaaaccaaattgagtaatacatttatttttaaccttttattttgaagtttttaaaattgttattattattttggaggcagggtctcactgtattactcaggctggaatgcaatggtgcgatcacccctcactgcagcctcgacctcctgggctcaggtaatcctcccacttcagcttcccaagtagctgggactatacaagtatgtcatcaccccatctggctaattttttattttttagagagacagtgtctctctatgttgcccaggcttgtctcaaactcctgggctcaagcaatcctccaatcttggctaatttttgtattttttgcagagactaggtctcactatgttgtccagggtggtctcgaactcctgagctcaagtgatccacccaccttgacctctcaaagtgctgggattacaggtgtgagccactgtgcccagccagtatacattttttaaaaagataactcagaataatgaccaaatgcagttttgtccagtaaggcaaagtaagtttaatataccaaaaaatgtaattaatcatattaacaaaataaagtaaaaaatctagacaaccacttcaatagatgcagaaaaagcatttggcaaaatttagtcattattcatgatttttgaaaactagaataaaaagcactttcctcaatttgatagaagttatctcagaaaaaaaatacccacaattgacctcatatttaatggtacaatattgagaactttgctgctaatactggaaacaaataaataagaatgtctattctcatttcttctattcaacattatcctagctagctcaataaagaaataaaacaacttacgagcataaagactgaaaaagaagtaagtccgtctttgtacaacaaggttatatacatagaaaatcctgaagaatctgcaaaaactattatattatagtcagtgagtgaaattagcatcaatattgtcaacataccaaaaagtcaattgcatgtctaccagcaacaaatagttgaaaaatcaaattttagaaacaccataggcaataatatattaaaaaaacactaataattttatgaaagatatgcaagacctctattataaaaatacaaaaatgttgcttgaagaaataaaagacaactgaaatacatagagagatgcatcatgttcatagaatagactcgatattgttaagatgtcatgtctctccacgttgatctatagattcaatgccatcacaatcaaaatgtcagcaggtttttaaaatagaaatggacaagctgattccatcatttatatggaaatacaaaagacctagaatagacaaaacaattttgaaaaagaagaacaaacttgaaaaacttacactattggattttaagacttactacaaagctataataatcaagataacataggctgggcatggtggctcacgcctgtaatcccagcactttgggagtccagggtgggcggattacgaggtcaggagatgaaggccgtcctggctaacacggtgaaacccctctctactaaaaatacaaaaaattagcggggtgcggtggcggacgcctgtagttccagctactcaggaggctgaggcaggagaatggcgtgaacccaggaggcggagcttgcagtgagccgagatcgcaccactgcactccagcctgggcaacagagcgagactctgtctcaaaaaaaaaaaaaaaaaaaaaaaaaaaagataacatagtattggtataggagagacaaatagattagtggaaaagcgtgttcataaacaaacccacatatataataattcatttttgacaaaagagtcaaggtacttcagtggggaaatgaaagtgccgtcaaggggagagacttcaactctcaccttacaccatttgcaaagattaattcaagttagatcatggacctaaatgtaaaaagctgaaactataaatctcctggaagaaaacataagattttgcagccttggagtaggcaaagatttcttaggacaaaaatgtaaccataaaggaaaaaaaatgatcaattggacttccttaaaattaaaaattccattcatcaaataatacctttataaaatgaaaaggtaagacaccgaatgagagaaaataatcacctcatatatgtgatacagacttatatacagaagaaatgaataacttccacaactcaataataaacaaacaatccaattttttaaaaaggcaaaagacttggcagagtgcagtggctcatgcctgtaatcccagcactttgtgaagccgaggtgggaggattgcttgagcccaggagttcgagaccagcctgggcaacatggcagaaccccatctctacgaaaaatacaaaaattagccaggtgtggtggtgcaagcctgtggtcccagctacttgggaggctaagatgggaggatctctggggcccaggggtgaaggctgcattaagccatgattgtgccactgcactctggctttggtgacagagcaagaagaccctgtctcaaaaaaaattaattaattttaaaaaagacttgaagaaacatttcacaaaagaagatatttgaggccgggcacagtggctcacgcctgtaatcccagcactttgggaggccgaggcaggcagatcacttgaggtcaggagttcaagaccagcctggacaacatggtgaaacccagtctctactaaactacaaaaattagctgggcatggtggcacgtgcctgctcaggaggctgaggcaggagaatcgcttgaacctgggaggcggaggttgcagtgagccgagatcgcgccactgcattccagcctgggtgacagagcaagactccgtctcaaaaaataatatatattattatataacaataataataataactaaaacaacaacaggctcatcagaatggttaaaattaaagtctgaaaatactactacatgttgagaagatgtggacaaccagaactcactgacatggattataaaatagtacaacctacaaccactttgaaaaacagtttggcaatgaagatgcacctaccctatgactcaacaattccactcttaggttttacccaagagaaatgaaaacacaagtccacacaaagacttgtataagaatgtttttggggtttttattgttgctgtttttttttgtttgtttgttttttgagtcggagtcttgctctgtcgccaaggctggagtgcagtggtgcgatctcggctcactgcagcctcctcctcctgggttcaagccattctctcgcctcaacctcccaagtaactgggattcccagtgcagaccaccccacccggcaaatttttgtatttttagtagagatgggtttcaccatgctggccaggctggtctcgaactccttacctcaggtgatccgccctctttggcatcccaaagtgttgggattacaggcatgagccaccacccctggacaagagtgtttatagcatttatattcataataagctcaaactggaaacaacccaaatgtccatcaacatgtgattgaataaataagttgtaatatattcatgggaaaccactcaccaataaaaaaggaactaactacaggtgcatgcaagaacataataaattgcaaaagtcttatgattagttttttaaaaaagccagacacaaaagagtacatattgaataatttcatttatatgaagttctagaatagggaaaaattaatctatggaatagaaataagaagagtggttgcctctggagatttcctggaaagaggcatgagggaatttactgggatgatgaaaacgtttgatacattagttggggtagcgggtttgtaaaagccatttactggaaaatctgtacattttactgtatgtaaattacacatcaataaaaaattgaatcgtgtaagtagcacatcaagtatatatcaattatatatatctatacatataaacaattgtttaagaaaaattatagttagcaccatacttaataataaaatactgaatgttctctgagtttgggaataagacaagaaagtccactttcaccacttttattcaacatcacattggttttaactagtgcaattaggcaagaaaaggatatgaagactggaaaggaaaaagcaaaactataattatttaaacaacatgattttgtatatagaaaatccggctgggcgcggtggctcatgcttgtaatcccagcatttgggaggctgaggcaggtggatcacctgaggtcaggagatcgagaccatcctggctaacacggtaaaacctcgtctctactgaaaatacaaaaaattagcggggcatggtggcgggcgcctgtagtcccagctactcaggaggctgaggcaggagaatggcgtgaacacaggaggcagagcttgcagtgagctgagatggcaccactgcactacagcctgggcaacagagcgagaccccgtctcaaaataaaaaagaaagaaaatccaatagaatctgcagataaactattagaaataataagtggttagtggccgggcgcggtggctcatgcctctaatcccagcactttgggaggccaaggcgggaggatcacctaaggtcaggagttcgagaccagcctgccaacgtggtgaaaccccatctctactgaaaatacaaaaattacccaggcgtgatggcacgcacctgtaatcccagctacttgagagactgaggcaggagaattgcttgaacccaggagacggaggttgcagtgagccgagattggagatccactgtgctccagcctggatgacagagcgggctccatctcaaaatgaaaataaaaataagtagtttgcacaagaatgggcaaatagactaccactggtacagaatagaatgcagaaacagacctacagatacatcgtcacctaatttacatcaaagacccaactgcaattcagtggggaaatgatctttccaataaatagtgttagagtaattggctagccacatagaaaaaattgagtcttggctctcccatttcgagcctacactcagattaatttgagatgtataatagacttcagtgcgaaagataaaaacaataaaccttctagaaaaattatggaaggatattcttatggccttggggtaggcaaagatttcttgatcaggacacaataagcattaatgatatatttgacttcattaaaataaacaagctctgttcatcaaaagataccataaagatgaaaaatcaaaccacagaatacataactcctattaactaattttaaaaagtaaaacaatctaattttagattgtttaaattgtttagatttaaacaatctagatttaattttaatctagatttagattcaaataggcaaaactgttgaacgcatttcacaaaagagatatccaaatacccaacaaatatgtaagtactcaaatcaccaggcatcaggaaaatgcaaattacagctgcaatgagatacctattctgcacatcgacaagtatggctaaaatttgaaaaactgaaaatttatggtgcgagtgtaaattggtatcattcttctggaaaactctttgacaacttctgtgaaagataaaaataagcttaccttattatctagcaactctaaggtaagtacacaagaaacataaacgtgtatttccagcaaaaatcatgtatagccaaaaactagaacaaacctgaagtccatcaatagtacaatagataagtaaattgtgttatagtcacacaacagaattccatacagcattgaaaatggtccaggcacagtggctcatgcctgcaatcccagcactttaggaggcagaggcgggaggtttgcttgagcccaggagttggagacaagcctggacaatatagtgtgaagccatcactaccaaaaaaaataaaataaaattgactgggcatgggtggcacatgcctatggttccagctactctggaggctgaggtggggcaatcacttgagtccaggagttcgagagcagcctgggcaacatgacaaaactgcaacatggtctgtacctaaaaaaaaatacataaattagctagtcccagctactcaggcagctgaggtgggaggattgcttgagcatgggaggttgagcctgcagtgagctgccatcaccactgcactccaacctgggcaacagagtgagaccttgtctcaaaataataataatacattcaacaatatggatgaatcttacagacataattgttgagtgaaagaaaccagatataaaagagtatgtactatataataattccatttctatgaagttcaataacaggcaaaaaaaaaaaagaaagaaaacccacaaacaagaaaaacaaaactatagtgggccaggtgcagtggctcacacctgtaatcccagcacgttggaggctgaggccagcctggccaacatggtgaaatctcgtccctactaaaaatacagaacttggccaggcatggtggcacgtgcctgtaattccagttacttgggaggctaaggcaggagaatcacctgaacccaggaggtagagattgcagtgagccaagatcatgacactgcactccagcctgggctacagagcgagacataacaacaaaaccctatgttaatagaagacagaaacagtcacctgtagggacaggtttgggatgggggtgccttctggagatggaaaatgttctgtgctgggtggggtgtctcacgcctatgatcccagcattttgtgaggccgaggctggtggataacttgagcctaggagttcgagacaagcctggccaacatggcaataccccatctctactaaaaatacaaacattaggtcaggtacactcacgcctgtaatcccaacactttgggaggctgaggtgagagaatcaactgaggttaggagttcaagaccagcctggccaacatcgcaaaaccccatctctactaaaaatacaaaaaattagctgggtgtggtggtgcacacctgtaatcccagctactcaggaggctgaggcaggagaattgcttgaacccaggaggcagaggttgcaatgagccaagatcacgccactgcactccagcctgggtgacagagcaagaccctgtctcaaaaaagaagaaaaaaaatgttctgcattgtgaatctgggaatggttatatcatatacctatgggaaaatttattaagctattacataagatttgtgtcctttgcttatgcatgttatacctaaacaagataagagtcctttaaattcattttggcatggcctatcctctattaacatagccactccagcattcctttttttttttttttgagacagagtttcactcttgttgcccaggctggagtgcaacggcctgatctcagctcactgcaacctccacctcccgagttcaagcgattctcctgcctctgcctcctgagtaactgggattacaggcatgtgccaccatgcccggctaattttgtatttttagtagagacggggtttctccatgttagtcagactggtctcgaactcccgacctcaggtcatccacctgccttggcctcccaaagtgctgggattacaggcgtgagccatcgcggcccggcctccagcattcttttgattaatgttagtatattcttgtactttctacctatttgtgccttttttctttttttttctttctttctttctttttttttttttttgagctagggtctcacgcccatcacccaagctagagttcagtggaatgatcttggctcactgcaacctcaaattccaatactcagtttcctgagtagctggcactatcagaacatgccaccactcccggctgatttttttgtatttttagtagagatgggttttcaccatgttgcccaggctggtcttgaactcctgggctcaagcaatctgcctgcctcagcctcccaaactactgggatttcaggcatgagacaccgtgcccggccttgtgtctttatttttaaagcgggtctcttgtagatagcatatagatgggtgttgctttttcatctgccttttaattgggttgtttagtttatgtatatctattttaattgttgatctgattgagtttaaatctaccatcttggttgcacaactgtataaatttattcagtatcattaaactgtttatttaaaatccaccatcttgctgtttttttgtttggttttgttttgtttttcgagacagagtcttgctgtgtcacccaggctggagtgcagtggcacgatctctgctctctacaaactccgccttcagggttcaagtgactctcgcgcctcagcctcccgagtagctgggattataggcgcctaccaccatgcccagctaatttttgtatttttaatagacacagggtttcaccgtgttggccaggctgatttcaaactcctgacctcaggtgatctgcccactgtgacctcccagagtgctgggattacaggtgtgagcgaccgtagctggctgttttttttttttttttttttttttgagacacagtttcactctgtcccctaggctggagtacagtggctcgatctcagctcactgctacctctgcctcctgggttcaagtgatcctccttcctcagcctcctgagtagttggaattacaggcatgcgccaccatgcctggctaatttttgtatttttagtagagatggggtttcgccatatttgccaggctggtcttgaactcctaagctcaagtgatccacctgcctcagcccccccaagtgctgggattacaggtgtgaaccactgtgccttgcctagattgattgattgattgattgattatttatttattttgagacggagtcttgctgtgttgcccaggctagagtgcagtggcgtggtctcagctcactgcaacctctgcctcccgggttcaagtgattctcctgcctcagcctcctgagcagctggaattacaggtgcctgccaccatgccgggctaattttttgtgtttttagtcgagatggggtttcatcaacatgatggtctcaaattcctgaccttgtgatccgcccacctcggccccatgaagtgctggaattacaggtgtgagccaccatgtgtggcctagatttattttctaataacaattcttgagttttgttctgggatgaagcgaagctacttcacaaaagtttggtccctttgaggctaatttttaagctttgttaggcgggactagaacagactttagtctagggctaattttgccccattactgagtcaatacccttctgagtactatctgatgccctgttagttataatgttttgtctctctgctagcaggaccataaccaattcccagccttgtgtgagtctcggaatcattctctctcctccgttggatggtcttgacctggcctcaggtggtttcctcacacacatgcactgattagtactcggctgaagactcaagtgggatcccctgcaaattttcaggattctcttcctctgtctggcacttttttttttttttttaagacagggtttcactcttgttgcccaggctggagtgcaatggcacgatctcggctcaccaaaacctccacctcccaggttcaagcgactctcctgcctcagcctctcgagtagctgggattacaggcaactgccaccatgcccggctaattttttgtagttttagtagagacggggtttcaccacataggccaggttgttctcgaactcctgacctcaggtgatccacccgcctcggcctcccaaagtctgggattgcaggtgtgagccaccgcgcctagccctctgtgcagaactcttttctaataccttacccagtgaacttctgggcctctcttgtctcccaacttaacctcctcaactcaggtagaccatcagactctgactgacttactctgctctgtactgtggctggaaactcactccaggtaataggtttgaaaaattgtaggagctttgtttctcttctgtcagggatcactgggctgtgctgcctgatgtccagtatctgaaccccattgttctgaatattctgtctggtttttttagttgtttctagtgggaagataaatcaattacctgttactccatcttacacagaagcagaagctcagctcattcattttggagattcatgtcctacaattctgtgaatcttttttttttttttttttttttttttttagacagagtcatgctctgctgcccaggctggagtgcagtagtgcgatctcagctcactgcatccttaacttcctgacctctcaggctcaagcaatctgcccacctcagcctcccaagcgtgtgggactacaggcacgtgagccaccacacccaactaatttttgtattttttgatagagatggagtttcaccaagttgctcaggttggatgtgaaatttttaaaaaattgattgtcaatttccaactgggtactgtagctcactcctgtaatccaagcaatttgggaggccaaggtagaaggatcacttggggccaggagttcaagaccagcctggacaacacatcaagatcctgtcactacaaaaataaataatttaaaacatcagctggatgtggcggtggcatgtgcctatagtcccaactactggggaggctgaggcaggaggatcacttgagcccagcagttccaggctgtgtggtgacccatgatcacaccactatactcctgcctgggagaaagaccctgtctttaaaaaaaaattttttttaaattaaaagtcagtttcctgctctcttcatctctgtcttctgtttcaggattagtcagatattggagccaccacactccagtctgggagacagagtgagactctgtctcaaaataataataataataataataataataataataataataataagcacatcagttaccactccttgagcgcctaccaaattaccaaaaacctgccattttaatagattttcttattgaatcatcacaggaattccatgaagtaaatattattatccctctttcacagatgaggggactgagggacaaagagattaactcactagctcaagatcataccgtttgtggctgggtgcggtggctcatgcctgtaatcccagcgctttgggaagccaaggtgggtggatcacgaggtcaggagatcgagaccatcctggctaacacggtgagaccccatctctactaaaaaaaatacaaaagattagccgggcgtggtggcaggcgcctgtagtcccagctactcaggaggctgaggcaggagaatggcgtgaacccggaaggcggagcttgcagtgagccgagatcgtgccactgcactccagcctgggtgacagcgagactacgtctcaaaaaaaaaaaagatcatactgtttgtggaatggcagaagctgggttgaaactcagccatgtggggcaccaaaaaccgtgatcgtgaccacagagggcagctggaattcaaggggcctgcctgtttttctgcaactcaccatccacggatttcctaagttttttgtgccaggctctggggaacctaagtgaatgtgggcccaacagatgggtgttcaccagagagtgagccaagaaagaggggtggggacagacagaggtccctatagaagtagaaaaaagcaagacaaggccagaagactgtgtctttcttcttctttttttttttttcttttttttcgacagagtcttgctctgtcgcccaggctagagtgcagtgacacaatcttggttcattgcaacctctgcatcccgggttcaagcaattctcatgcctcagcctccagagtagctgggactacaggtgcgtgccaccacgctgggcctttttttttttttttttttttgagacggagtcttgttcttgttgcccaggctggagtgcaatagtgcaatcttggctcactgcaacctccgcctcctgggtttaagcgactctcctgcttcagcctcccgagtagctgggatgacaggcgcctgccaccacccctggctaatttttgtatttttaatagagatggagttttgccatgttgcccaggctggactcaaacacttggcctcaggtgatccacctgccccagcttcccaaaatgctgggtttacaggcatgggctaccatgcccggccatgtgtcttttgactttaaaggagcagcttgcaaatcatattcaaagcagtatgcatatgagatgtaaattgcatcagaaatgagcatctggtatttttgagtcaatagctcaggcacttttgggagggccctccccagctttctcccagggttgcctggggtcaggatcccttgcaagacctattaactaaacttgagatgtagcatgtgcctctgccaaacccagctctggatagaaaggggagtgctgctgaccatgtcaaggtgggttctttattctcacatttgtctgacaaatacttgtaaagcacctgctgagcataaggtgctcaggcagatgcagtagacaagcaggaaagtcattatttctaacttttaggaacataccctctactcggggaaataaataaatacagtaaagactccagtattgtctagagtctagaccaggctttctcaacctcagtgctattgatatttggagctgggtaattctttgttgaagggggttttccggagcatcgtaagatacttagcagcgtccctgagctctacccattagataccattagcaactcctgagttgtgacaaccaaaaatgttcccagacattgccaaatgtggggagggagggcaaaatccccccagttaagaaccactgctcaagaccctaaggctatgagcttttcatacagacccagcgggctgaggacttgccttcaaggatgcacgttgttccatatttttgtattttaaccactatggaaggtgctcttctcaaatttatcatgtaattcttttccttgaagcccagacctgccccgcaaccacagcatgcgctataattccatccagatcccggagattcttgaggaccaatcaacgttgcccccagatggaatggccccagcctgcagagcctgtcaggtctgcagtctgctctttctgctcttcagcatctctctacctcctctttccctgtcatccaattggccctgtgggactgctcgttatattcttatcgactctggcccccattccctttaattggcagcttcgaggagttaaggaacttagttttgcagatcagtgtttttctaactgtgccccgccaagcactgggaatccccagggccctctcagaagcccccgtaggatgtagtggggtaggaggaggaggaggagcttccgggaggctggaggagtggaggcggcaggtcgccctgccccagccctcagtggccccacagcagcttggctgttcttggttttgtttctctctgcttctgcatgatatctttgaacaaaaagtcccaagtgtacaaaaagtcccgaaaggcgttcgcaaaccactgacctagatggagggaattgtgaggagcagagggcaccctcttataaaatgcctgtacttcggtgcagggtttggtggtgtcggcggtttggaggccctttaagcttcctaactccttgtcactggtggatggtggggtgccggcaggagggcatccctttacataggggctcattgctgtatggatgtgggcagagaacgaacaggagagggagactgaactcctggcttccacatcaggcacaaaccccaggacgtgaagatccctaactgcctcccctccggcccccaaatagcagaacagagagtaatcgcactgcagtggcagtggaaagagctgaagctagacgccgggaagaacttcccaacttggcacctgggggaggagcagctgggagcaaatgtggaactgtctgaggtaggaggaggtcccctttgcaggctgagagataatcacatacatcctcccactcacacccccttcgtctgctcctgccccaaccagggctgactccagaaattctgcacagataaacctccaggccctgaaactcagcaaggggtggggagagtgggacctggggccatgccccctctgttgctaagaagccctttctgggtgagcgtggtggctcacacctataatcccagcactttgggaggcccaggcaggtggatcatttgaggtcaggagttcaaaaccagcctgaacaacatggtaaatccccatctctacaaaaaaaaaaaaactatatatatatatatatacccacacacacaaaaattagccagcgtggtggcacgcctgtaatcccagctactcgggaggctgaggcacaagaattgcttgaacccgggaggcagaggttgcattgagccaagactgcgccactgtactccagccttggtgacagagcgagactccatctcaaaaaaaaaaaaaaaaaaaagaatccctttctgtctgacccccaccagacggcagcagaattgtgtggagagcttgttcccgagggacctgggggatggagcaggcaatcccttctccctctgacctccaggccccactgagccctctggacacaagcacaatcaggcacttcatgcctggcaagggtcagaatgaaaggcctgtgtctgtctgctccccgcctccctttctccatcttcagataattccatctgcccttgggccagagcctcatctttctccctcctttccccctcctgcccgctgagttatttacaaatatctgggaacagaagggatttcttcagtgctctgtagtgcctgccactgactcaggtctctaacatgctggggggcagcgagggtaaagatgcttgtggtcctctcctgtcacccacaggaacccaaagagctcaatacactgggcgcagtggctcatgcctgtaatcctagtattttgggaggctgaggtgggaggatcacctgaggtcaggagttcaagaccagcctggccgacataatgaaaccccatctctacaaaaattagccaggcgtggtggtacgtgcctgtaatcccagctacttgggaggctgaggcaggagaatcacttgaactcaggaagtggaggctgcagtgagctgagataacaccactgcactccagtctgggcaacagagagagactccatctcagaaaaaaaaaaaaaaggctcatgcctgtaatcccagcactttgggaggccgaggtgggcggatcaagaggtcaggagatcgagaccagcctggccaacatggtgaaaccccatctctactaaaaataaaaaaaaattagctgggcacggtggcaggtgcctgtagtcccagctacttgggaggctgaggcaggagaatggcgtgaacccgggaggcggagcttgcagtgagctgagatcgctccagcctgggtgacagagcgagactccgtctcaaaaaaaaaaaaaaaaaaaaaaaagaccttggccttggctagacacggtgtaatcccagcactttgggaggtgaggccgaggcgggcggatcacctgatgtcaggagtttgagaccactctggccaagatggtgaaaccccatctgtactgaaaatacaaaaattagctgggcatggtggtgagtgcctgtaatcccagctactcaggaggctgaggcagagaattgcttgaacccgggaagtggaggttgcagtgagctgagatggcgccactgcactccagccggggcgacaaagcaagactctgtctcaaaaaaaaaaaaaaagaaaaagaagagctcaatggctccccaaggtcacaccgtggcagcccattttctgtttcccactctgttctcctacatggtttgtcccgggtacagggtgaaccaggaagaggatgagttaccgccatttccccatggagtcaaagggcttcttcctcctggaaaatccccggacacggaagtgactaagacctagtggagctgctgaacctaaaaagtaagttcaaattcggggcccctccttctgatagccatgtggcccaaagaagggaagctgtccgtgcagctgggggagctgatctccaacatgttctccccaagcccacctcctgccaccccaccccaatgctgaagcccagacaagcagccaggaactggcgtcaccatccccagtcccgcagacgctcatcccaccgccaccacccgtgagcaaccattccggggcctgacattctgtcggcttcacaccacctcccggagccccagccagaagcacttcctggataaaatattaaacatgcaaatctgagacagagccttaacgagcgacagactgcacgaccacagcctggcaaacgagacgcacgacgtccgggggtgggggggtgagaggtatatatagatatagactttggatctatctgtgcaatgtgtgtgtaaggcagagaacagcagggatggaaaagtaccgcagcagcctccagctggggtggcctgaggtggcggcaggaggctggccgggagggagggtcaagaggagccccagagccaggctcagagtgagggatgacaaaagccctttgtgcttggattctgtgcagggggtgccagacacgctgggcaggggaatgggcattggttttggagaaggaagttggttagaggcaaggcctccgagtggaagaaaagaaggggagacagaggagaggcatagacctgtgtggcaggagtaggggtgtctagagggagaacacctccactcacatggggcacggggcggggggggggtgtctcttgtcaccacactggcccaggtgtcatggagctcacgtggaattaggtcagcaaggttcctgccttgattcaggtcagcatgcatttgatgatggcgcttcttaaacttgtacatgtgccaggatcgtctaggatcttgttggtaaatgcaattccgattagggaggcctggagtggggcctaagagtctgcattactagcaagactcaggtgatgccagtgctgctggcctcccggcccccataaagtggcgagggactacaaggagctagagcaacacggagctccctttggctcaggcgaacacaggacccacaagagtccagagtgggatcagaggctgagcccaaaggcgtctggcctaaggggaggtccacggtgctgatcaagatggtgtctgtccacagtgtccagcctgtcatggaattagaactataggacacctaacttggcccaaaccaacacagaacccagcccagggtgtcagggagcctgtagcagcccacactgagacagggctcacagggcctggagtgacatggagcctggtggggtgggactgaatgatagggcgcccatgttgcttcaggaaatcacagagcccacagggattagactgaagtggtgcccgttttggtccagagtgacatggaacccacagtggccacaggggtctggactgacttggaactcagaaaggactaacagaggtgatggccacatttgctcagggtgacatagagctcatcaggacttggaccaactggaccaaccaggcacccaacacagagccccagacatgacagggggctctccgtgcaaactccaggttgcagaagacaggaagggagggtccggaggaggctgggagaggagaggagcaggtgccggggagcaaggctgctctgtggctgctgtgagcctgcctgccgtgggctgagtgctacttggctgggccccagagaggaggtgctgctgctgcaaggctcagatggaggaggaagtgggaagctggaggcagggtgggcgcgaggctggggtggggagagcacttcctcccccaaagaggcttggcacgggggctggcccactgcccatgtggatcctggcatttacactccccgctcccattatacacaggcgatgcggtgggttatgggtctgggacttacggacctcagatcaaggagcattcagcgctgggggaacagacaaaccgatgtctccctgaatggagcactcagggtccagaggaggaagggttctccctcctggcactggaggtccttttgatgcagccaggtccctaggcagagtgccctggccctattgtgtccttgcccagaggaatgcagaaaacaatgcaggctgccccttcccacatccctggcaagatctagaaataggtgcccacaccttcgtcttaactaaacccagccctccctcccgcttctggtcagatgcctctcagtccttgtccctaccaaggggagaagcccctcagaggctacctgcagcttctctttatgccaaggttaatgtagaggaggaagggatggagggaggggcattactatgaatttattttttgagacaaggtcttgctgtctcacccagaccaaagtgcatcagcacaatcatagctcactgcagccttgatctcttgggctcaagcaatcctccccgttcagcctcctgagtagctgagctgggactacaagcacaagccaccacacctagccaatttttaaaaattttttgggccaggcgcggtggcttacgcctgtaatcccagcactttgggaggccgaggcgggcagatcacaaggtcaggaaatcgagaccatcctggctaacacgatgaaaccctgtctctactaaaaatacaaaaaattagccgggtgtggtggcgggcgcctgtagtcccagctgctggggaggctgaggcaggagaatggcgtgaacccgggaggcggagcttgcagtgagccgagatcccgccactgcactccagcctgggtgacagagcgagactccatctcaaaaaaaaaaaaaaattgtttacagagtctccctatgtttcccaggctggtctcgaactcctggcctcaagcaatcctcccacctctgcctcccaaagtgctagaattacaggagtgagccactgcacctggccaatttgaatggggagctggatgacgctccccatccagcctggtactgctgaagaatccaaccctaactccactcctgcccacacatctccaggctgacctagtttctgtttcaaggcaggggggacacatgttacacactcctagacacagagctgtgcagagccaagagatgcacacgcatgcacgtgggatagacgaatgcaggagatcgcacactcgaggccggtgcacacacatgcatatccagagactccttcctgactcacgaacaaacccaaggaccccctccagcagacacacagacagagctccctgttcacagggccacacagacacacatggacctcataagccataggcgtgattccccacaggggttccctactctctatccagctcctgctcccaggtccccactctctggggcacaaaaacagcaaaggcagtcctgctgccacactaccagggccatgggatcaaggatcaccgcaaccctgggaatggatccccagtctcccctcttctctccataagctcctgtcttttggaactgcagtgcttatttccccaggacaagtctctctgtgggagggaccaagggtggaggacacttcacttccctacttcccttctggtttttttgtttgttttgagactgtcgcccaggctggattgcagtggagtgatctcagctcactgcaacctccgcctcctgggttaagcgattctcctgcctcagccttccgagtagctgggactataggagtgcatcaccacgcctggctactttttgtatttttaatagaggcggggttttgccatgttggccaggctgttctcaaactcctgacctcaggtgatccacccacctcggcctctcaaagtgatggaattacaggcttgagccactgcacccggccttttttttttttttttgagatggagtctctctgccgcccaggctggagtgcagtggcgcgatcttggctcattgtaacctctgcctcccggattcaagtgattctccctcagcctcccaagtagctgggattacaggtgcccaccaccacccctggctaatttttgtatttttagtagagatggggtttcactacgttggccagactggtcttgaactcctgacctcatgatccacccgcttcggcctcccaaagtgtttttttgtttgtttgtttttctttttttttgagataagttctcactctgtcacccaggctgcggtgcagtggtgcgatcatagctcactacggcctcaaactcctgggctaaagtgatcctcttgtctcagcctcctgagtagctgggacaataggcacatgccactgtgcctggctaattttttaatatatttatttatttacttttatttttggagacagggtttcgctctgtctctctgggtggagtgtggtggggcaatcacagctcactgaagccctgacctcccaggctcaagcaatcctctcacctcagactcccaagcatctgagactacaggtatgcgtcaccacacccggctaattgcttattttttgtagatagggggactcactatattgcccaggctggtctcaaactcctggcctcaagcaatcctccctccttggcctcccagaatgctgggattataggtgtgagccactacactcagcccctcttcttcttatttttgttttttgttttttgagacggagtctcgccctgtatctaggctagagggcaatggcacaatctcagctcactgcaacctctgtctcctgggttcaagcgattctcctgcctcagcctcccaagtagctgggactacaggcacctgccaccgtgcccagctaatttttttttatttttagtagagatggggtttcaccatgttggccaggctggtctcaaactcctgacctcaagtgatccactcgcctcggcctcccaaagtgctgggattacaggtgtgagccaccgtgcccagcctgtctccaggctcttgtgtcaggtgtgtgtgcatgtgtgttcatgtgtgcgtgcacgtgcgtgtgtgtgtgcatgtgcataggagcaggagtctgagcccgtttgggaacacgcttgtccatccctgtccacctgagctctggagcccagcacctgccctccacagaggccttcctctcttctttccggtgtccccaacccctccctctctcctaacgcactgtaatcgtgctggatcctgggttcgttctagagccttcctcatctctgcccttcctcatccaagttcctcaaaagagatgcatgggctggatctgcttctttccctcccgtttcatccctactccccaggaagatctcactagagtcactggtgccatcctgcttgccaaggccagtggaccttcctcatcctgtatctgatcttgtttttttttttaagacaggatctcactctgccacccaggctggagtgcagtggtgcaatcactgctcacttcaacctccacctccccaggctcaagtgatcctcccaccttggcctcttaagtagctgggactatggcttgcgccaccacaccagctaatttttgtatttttagtagagacggggtttcaccatgttgcccaggctggtctcaaactcctgacctcaagtgctccacccgccttggcctcccaaagtgctgggattacaggcatgatccaccatgcccggctctatcccatctttgtgtgacattccaccctgttttcctcctttcttgatactctcctcctttgattattggatgagttagggtaagttgtgttcgttaggccaatattttattttattatgttttaattttccattgtattaatttggctaattattttttcattaggttaattctctgtattatttgggctatgctaaactgtttagcttagtctaagttgtactggttaggctaaactcctagaacaaagagatccaaaaaaagatgatggcttgaagaatgtaaaatttgcttctttcctgtgttgcaggtgaacactccaggtcagccgggagctctcacagccattcggggaccaggctccttccatgtgctgctgtgctgccccctagggccctgccagtgactcaggaccgaagctgagtgactgccatgccgggttccagccagcaggaagggcaagggagtgtggggcgggcaggcccagggtcttaaagcccaggctgggagaggcacacaccccttccccttcgcagcccagtggtgggaattaaatcacatagtcatacctgaccgcaaaggggctgggaaatgtgcctacccagttggcacagggagctcagatttgggtggacaatgagcagtggtcaccagagcccccagagcctccccctctctccctcctctccaccctctctctccccactctctccctggccattcctccccagcccccgcctttttttgttgttttttttttttgagacaaagcctccctcttttgcccaccacaggctggagtgcagtggcatgatcatggctcactgcttcctcgacctcctgggctcaagtgatccacctcaacctcccacaaagctgggactacaggcacgaaccaccatgcccagctaattttttttttttttttaatttttagtagagacaaaatctgactatgttgaccaggctggtctcaaactcctgggctcaagtgatccgtactccttgccctcccaaagtgctgggattacaggcgtgagctgccacggcacttggctcccctttgtaaatgtgccccagggctctgttcttggcccttttctcaccccacatgcatgccttggccattcccgtccaatcctgtctgatgccctaaagcctccctacctccagctcaggcctctctcagccacaaacccacgcaggcaacagggccaaatctgggactcaagccacactcctcctctgcctcaccccacattcaatctgtcaccaaagctggtgagtctaccttgtaaggaccccctcaccgagactgtcctctccttctccccgccgaccccgcccccgaatgggttctcacagcctccacccctgcccccctgcctctacccccagggactccacaccagcctcccatgaatcatgaaatgtgagtattcaccctgcctgttcctgagccctcttctctcacagtctgattgggtcacccttcaggggctccctcttgtcttcagaatcaactccttaccctaacatataagaccttttgtgatctgacctcggtctacttcatctcttgtcacatgtaccctgtgctccagccactcaaatcttggcacttttgtgtgtgctctgccccagtgcctcccggccttcacttcagggattcctatatccttgaagactcaattcagagagctccttctctgagaagccccctctgatgccctgatgctcttcccacatgctccactgttccctcaacctcaccagtctccacctctatgcctgtcttgtcctgattgctcacttacctctctcccctgctaggtggtgagctgtcggagagcaatatgaggttttagttatttctcatctccagtccttagcccattgttggagacagttaacgcttaacgcttgagaaatgttagctcctttctcttctcctttaaaactgtgacacaaaggctgggcacagaagctcacgcctgtaatcccagcactttgagaggccaaagcgggtggatcactggaggtcaggagttcgagaccagcctggtcaacatggcagaaccccgtctctactaaaaatacaaaaattagccaggcgtgatggctcacacctgtaattccagctactcgggaggctgaggcaggagaattgcttgaacctgggaggcagaggttgcaatgagctgagatcactccactgcactccagcctgggcaacagagcgagactctgtctcaaacaaacaaacaacaacaataaaaactgtaacacgtagctttatacataaaactaaaatctggaaacagcccaaacatccatcaacaggaaaacatatacattgcagaatattcattcaatcaaatactacacggtgataaaatgagttaactacagcttcatgcaacagcatgaatgaatcccatgcataatgttgaacaaaagaagccagacccaaaaacgtaccttccattcttatgagggtcaaaaacaagccgaacggatcttcggtgacagaggccggcatggtggtcatctccgggtcaggagatcaactgggagcaggcctcacacagcctcccaaaggctggaagtgttgcttatctaggtctgggtggcgatcacacaggtaatgtacatgtgtaatgatcatcaagctgaaattctggtgcattttagagtaggtaacttccctctgtttgtttaagtgccatgattttgtaataaatcatcgtggaagccgggtagagtggctcatgcctgtaatctcagcactttgggaggctgagtcaggaggatcccttgagatcagaagttcaagatcagcctgagtagcataatgagacccccatctctacaaaaaataaacagagctcacgcctgtaatcccagcactttgggaggccaaggtgggcggatcacttgaggtcaggagttctagaccagtctggccaacatggcaaaaccctgtctctactaaaaaaatagaaaaaaaaaaaattagccaggcatggtggtgcacgcctatagtcccagcttctcaggaggctgaggcaggagaatcgcttaagcctgggaggtggaggttgcagtgagccaagattgtgcactccagcctgggtgacagagcgagattccatctcaaaaaaaaaaaaaattggccaggcacggtggctcacacctgtaatcccagccctttgggaggctgaggcgggtggatcacaaggtcaggagttcgagaccagcctggccaacagggttaaaccccgcctctactaaaaatacaaaaattagccaggcatggtggcaggcacctgtaatcccagctactcaggaggctgaggcaggagaattgcttgaactcaggaggcagaggttgcagtgagccaagattgcaccactgcactccagcctgggcaacagagcaagactccgtctcaaaaaaaaaattaaaaataaacagaattagctgtgcatggtggcacgtgcctgtggtcacagctactcgagagggtgatatgggaagatctcttgagcctgggagatcaaggctgcgatgagccaagatcgcaccactgtactcagcctgggtgacagagtcagagcctgtttcaaaaaaaaaaaaaaaaaatcaccatggatggcaagtctgcgtctgagaggcactttctgttacagagtcccctgattttaggtgatgacactgagccccagagagggtaaaacactcaacactcagcttgagtcgctcagcacatctgtggagagtccacaccctaaggaggggactgcatgtcctgctttccccatgccactctagggaccttgggggcaggctctgtgtctttgtgtctctggaacagagctctgggacctctacatattggtgggggctactcccaccccataacaggttgctgctgggtggtgaaacatggcagcagtgtggtcatttagagcacaaactcaaaggacacaattccgtagctgtatgggcttaacctctgtgaaccccagttttctcatctgcaaaatggagctaatagtaccacggttgggcgcggtggctcacacccgtaatcccagcacattgggaggccaaggtgggcagatcatttgaggtcaggagttcgagaccagcctggccaacatagtgaaaccccgtctctactaaaaaatacaaaaattagccaggcatggtggcccacgcctgtagtcccagctactagggaggttgaggcatgagaatcacttgaacccagaaggtggaggttgcagtgagccaagattgcgccacggcattccagcttgggcaacagagtgagactctgtctcaaaaataaataaataaataaataaataaataaataaataaataaataaataatagtacctacctcatgttgtgtcctgaggattacatgagcaactaagcataatataacaaggcctggttccaaggaaatgccattacagtgcttgctatgataaccactcaggaggaaacctagtcagacagaccagagctactttgctcctccactggctgtgtgacctcaggcaagttaattaacctctctgagtcccatttcctcatctgctaaacaaatagtacttatctattgctatgaaagcaaaataatgcctgtaaaacacctgacacctgcttaagttccttgtgtgcagagaccacgtcttgcacatcgatccccctcagggctctcactccatggcctgggagaatgaatcccttccccagccacccttctctggctcgccatcctctttctggtgctagcagacagcagcatctagtggacaagctctggaactgcattctggccaagggtcactcgccaagctgctgtgcagtcatttaaatgaggctttttaaaaatgctttagacaagggtggaggggtcaggaggaacggaggtggggtgaaatgcattgggcaagtattcattaggtgcctgctgtgtgcaaggcactgatccaggaccttaaaaaatgaagcaagagatacaagatcactgtagaaggacacaagaaaaatcacaaataattataactttgtcatcaataccctaactttttatcttagagaaaatgtgaacacagcatagggggacttggcacactggacagtgtcttctcaggaagtgttttttgtttttgtttttgagacagggtctcgttttgtcacccaggctggagtgcagtggagtgatcacagctcactgcagccttgatctccctgaagtggctgagcaatcgtcccacttcagcctccagagtagttgggactacaggtgcacgccaccacacccagcttgttttttgtttttgtttgtttgtttgtttttggtagcatcaagttctccctatgttgtccaggctggctcaaactcctgggctcaagtgattctccccgccttggcctcccaaagtgctgggattacagacacaagctaccttgccagccttctcaggaagtttttacaattgcaggggcgatttttttttgaaatggttgttacatgtcaatgactctcagttaaggccaaggcaataaaatgaaagcttaggtcaggaaggttctgcctcgagtcccctgacccaggttctccatagacagaggggagcgggagtgtctggccccaaagccgcactcgccctccacactccacagtcccttcctaccagacacagaagagtgaagagggtctagaggtggcatgaagcacatctaactgggggaatcaaaaaatacttcatgggagagatgacattttgcattggagaatgaaggtaaagaaagcagggaggggcatgctgggggcgctggggaaggaagtgcattccagcctagtagaccaggtataccttcactggtataaagcgaagtaatgggaaccaagttggttgagggagctgggggttaaggccaaatcacagagggctccaaatgacaggccaaggaggctgcatttaatactatcaggggacccactcagtaagaaggtaaactgatctgagggcatcagagaaaaaccagacacccagaaactattaatagttaggtggctactgtcatagtccagcctagaggtaggggacactgcaccatgatggagtggagattagagacagaattgtgagatccttgggaggggagaagcagggggaggcttggaaatagatagctgtgggtcaaatgggaggacccagctgagaattcaaggtgctgagtccaggggaagtaatggggagaaaagcagagctgtaaccagaatgtggacttgaccagggggactgctgtgggcagggagctgtgggcagggaccaggagcttggtctttgacaggggcaaatgagttgccattgtccctgtggagatgcgggaccaaggctcaggaggggtgctggagggagaggaggcagggacagtcaagtgggagtcatttacccatataggtgcaagctgatgacctaggggaggaaaacagaatcctgcgggcagatagggtggagggcaggcgccaccggacttcatcggactttgtctttttaaagcttctgggggaggggggcaagagaaggaggagatggaagaagacagaggcgggacctttggggacagagacccttgtgagtgtccagcagtgtcacaggctatgcagaagtccaggagtggtggcagggaggcaactgttgaatttgaggttgggggctctcctggctgaccttggcaaaagcggtttcagggacagaagtcaggctgcagaggtctaagaggtgagaggcagaggagctggaggcggctgatgctcccgggaggagggaggagacggtaagcagggctgggataggggaaggtgagcgaggggttactctgggggtcctgccagaccctgaagaggagggtagagacccagaggcacatggagaggagaccctctgagaccctttgagacagaaggaaaacaggtgatgctgtaagagcttagagacccagacagaaataagactatgaccaccacatccctgacaaaccaacgtggtggccaccagccctagaggacatgggactggaggaagggaggggtagaagcaggggctgaagacacctgggagggagagcagacttcctcagaccctctcgggctccagcgtattggcgtgggagagggagtcccagattcccgggagctcagagcctagggaaagccaggggtccctttcccctttccccaggcggctcctgttcggagaaacttgtggccctcgcttggaagcacgcttttccctattccaaccccaaatactcagtacctgtttgcttcccccagaagtctgggcaagtttctttcttttctgggactcagtttctggggtgggctgaatgatggaacccaaaaagatgtgtccaggtcctaatccccagcccccactcccccagagcctgtgaatatgacttcatttggaaaaagggtctttgtaaatgtaacttaattaaagatgtcaagacgagatcatcctggattgtctggtgggccctaaagccaatgacaagtgtccttgtgacagacaggagaggggagggccataccatgggagaatgggaactctgcagccccaagtcaaggaacacctggggccacagaagctggaagaggcacggagggggcccttcccgagagccttcggagggagttcggccctgcaatgccttaggtttggacctctggtcccagtaaatggaagagaagaaatatcggggtttgttgttgttgtttgagatggagtctcactctgtcgccaggctggagtgcagtgtggtatgatctcggctcactgcaacctccgactcccgggttcaagcgattctcctgcctcagcctccagactagctggtattacaggcatgcgccaccaagtccagctagtttttgtatttttagtagagacagggtttcaccatgttggccaggatggtctcgatctcctgaccttgtgatccacccgcctcggcctcccaaaatgctgggattacaggcgtgagccaccttacccggccgcttaaatatctgtcttttaagccaccaagtttgttatgatttgtcatggcagccctggaaactaacgtagttccctattctgtaaaataactagaattaaatcttatttggccaaaaggtgtgttttttaactcgccaccccgcccccttccaggttgagttgtaaccctttcacttgcagggcgggggtgggggagtgagggtgggggcaggtgatgcagggaggaaagaacctaaattaacagcatctcctcctgccccgaagaggaggaaagtccaagaagagtatttcatgcccaccagcccttcctccttcacccagagctcacaccatcatcccgtgcccggctccaggcaggcgggtggggcagacgctgacccggagcgcgttactaaaaccaaggggtctttgaaaatcagggagtctgcctttccagacttctgacagcccccctcttcacagcgattctctccccaccccttgtgtcttcttcctcccgttctccattcttggggggcaaaataagatggagactcccgaagcacagggtggaaggcactcccccaccccttcttcctcctcctcccacaacacagctggagggggaggggaggtcagcagggttcacagaggccagatgttaaggaaaaagagagaagtgcccacccaccccacccccaccctcacccccaaggaaagaaaaatgaaaggagacagtttttaaaacaaacaaaacttttatggtccaaaacagtttttctcaagaatctgctctatgcaaacaataacaactttttacaaagcattttcacagaaaaggagacaagtccttccccagcgtgggaattgttcctctcgcacctcgttttcgggggaagagggggcgctattcactagtgcgggatggaaggcgcactgggtccctcagttgttcggcagctccaaaagccccagcttcccttcatacctcaacttgccatctccctaagacctaagctcccctgacctcacctgggtggaggagaaagcacttccaatcctctctgactcaagatcctcctagctggagggcatggcagagggcatgatccaggcctatctcacccctcccctggaaaacagaacctctgaccccaaacctaatcccctggccctgcccctttcggatccatcagatctctgacaactcccgcaatccctgaggctggggtgttgcggggggaagcttaaggtacctcagcccaggttccatccagactcaaactttgccccttcaaaccccaggggactcttgaagttaggccaagagtcctttcatttaccacctctgcaaagtgcagcttgttttgtttccactctttaagggggctgagtttgggtgtccaaagaatggacttgggcctgccttccacctccaccccctctcatccataaatcggtggaggccctcgaaaggcgacttgtttggtctgattttattgatttcttccaccttctattactttccctgggacagtgtctagccccttccccaggcaaagtaagcactttccaggagaggaggtccctcagccctacccgtcctaagggaagtaagttgggggagggggctgattaatcaaggttgggggaaatctttctcaccggccagaccttacactcggaaagcaaacaaggaaaaaacgggaactccaaaactggacaaaagggaaaggtcggcggctgaggctgaagatctcaccaattaagggtcacctgcacttgagggggcctagaaaggggacaggaagggggtgatcttcctcttacccaagttccctcacccattaaaggctccagcggtgcttggagcgttagggaaggcctgaggggagcaaagggttaaaggcctggacagtgggggtgggggatgcccccagggagctgccaatcatctccccacccccaccacagccccgcaccccaggctcgcccacagacacagtaacaaccggtttgtccatcaccgaggtctctctcttctccccttttttttgggtgggggggtgtctttgagcggtggcctcctttgctcccactggggtgcaggccctgcctccaacggtccgagatggaaggaggcagggattggaatctatgtcatcagccttctcccgactccagccctgggttcctctgcaaaggatgagggggagggactgtcaccccgaaaacttaggtgcttgaatgaagatcactgttatttaggtccctctgcccacagctcctaaaatgtaaaggaaggggacaaatgtgagaaacggggctccctcctcaagcccgcggtttggccatggtcccaacttttcccctttggcagaagtcccacggtcagctttcatccatgttgatcccccagaatttgaggccagggggctcagggacagcgggaccccccatctgccacctccacagcgggtgggcgggcgggggcttagagtctccctggaggcgaagcgaggatgccggctttaggtctccgtcttcccccaccaccagggccggggggcaggggaagcagttgaggaggctgaaggtgctcgtggtggggagcgtcggtgcagggcggcggggctgcgcggtgcgcggagggggcgccggcagccggcgtttcttggcggctccccgagccggccctttcgcaggcggccgctctggcccccggcgcaaactcggagtgtccaaggcgaagcccttcgcgtaacaccaaagtttcgaccggcggatcagacgatcgaaatgttcctggcggagatctccgggtgcggccggagccgggctggccgtcgaggggctggccgctggagcctcgggggcggccggcggggggtttccatcgacttcggcaggctggccgggcaggaacggccgcggcgccgtcccgggacccgcgggctcggtggagaggcccgcaggtggcgacggaggccgggaactgggttcctgaggcgggctggcggctgggccacgctgaggctcgagacccggggccgggcgaggcggggccgaggcgaagctggtcgtagattcccgagggtgcgggggcgcagggcagcggcccggaggtgcacaggagcgaacgccgaagtgcgggaaaccgcctccgccctcttcctcctctccgcggcgggggcacgctgcgacgtccgcatcctcgccggcggcggtgttaggaacgccgggccgcccggtcggtgcccagaggtgcttcaggccatccggggcccagccgccagggcgcaggggggcctgagggccccgcagcactggggaccgcgccgccagctccccaggccccgggcccagagaggacgcccggggcttggcaagggcgcagaaggcgagggcacgcaggcacagcggagagaattcctgggtcccccgacacggcttccggggcgtgggggagcagggcgaccctcgcggggacgccggcactgccaggcggggcgcagggcacagggtctccatggagcagcctgaggggtgcccactgagcgggtccaggtcccagcggcgggatgccctggctgcccgaagagcccacgggtgaggggaacatcgccccccgtcgacggggaggtctctgctcacgggcgcccccggcccgccacccggggccgcagagctcgggctccctcttcgctctcctcacgcggccctcccggcggccggactcctgggtccctgtgagtcccggcggggtcggccgcccttctgccgccgcgtccccttcgcaaccccggcgggagaccctctcgagtcgcccgaagcgcagaggcaggggaaacaaagcggccggcggccgcgggaggcgggaaggaccccgggcccggcacccggtgcccgggcccaggcggcggggagggcgccttccgcccgctcggtttctttcttccccgctggctcccggagaccgcgttatagagaactgccccctcgctgccccaataccagcgccggggccgcgagcccgccgctgattgggccgcaccgcccgtgacgttagcccggaccccacccctccggcggcaccgcccccgtccccattccgcacacagacacacacacgtggacccggcgcggcggcggctgggagggagcgcgggagggagcgtgcgcgggtgggatcgcgagcggccagatgcgccgccgcacgtggcccggtggcgtcctgggatttcgtcgtcgcaaagccactcgttttttcccgagcagtcacggttttgcatctgtaaaatgggacggttcatatctgccctcttgggactaaaagagctatgtgaatcaacgtagatgaatctcagaaataatgtttaggggaaagatgaaatgaggcaatggttgtttacaagctttgcacagcagggattctagcgggccgtgaatggcccctaaaacagtgcgtggcacacagtaggctcaaaaatgctgtaatgtataagtagttaataattcagtacttgtatgcaagatgaacaaaaaaaataaatttggaagggtgggagtgttattacatccatggaagccgataaataggctgtctcggtatctatttccatttctctgatgcagtatctaaatactccgcctcaactaaattccgagggctgactctgcaacccctgacccccaatcccaggatgcccccctctgaggtttgatctgccaaaccggttgaagaggccagaggagggcacgcgcagaccctcactctcatctgccccaaggaaaataaagaaaaagtgaattcccagtacaaattctgataatgcagcacacacccccaccctgttctatccccttaaccttctttagtttctgcatagcttattgttacataaaagtctgtaaatggatttattctttagtgtctgtctctcccattagtctggaaatgagttgacgagaactttgtcttgatcattggtgcatcccccactgcctagaacagtggccaagatataataggtgctcaatcaatatgtgtgaatgaatgaatgagcaagtgagcgagtgaatgaatccttgggatatttctctcttgataaaaatcaggttattggaatactgccgtttcctatctgtggaaatacagagattggtatgatgacttggggtaaaggtgtggaagaatgctgggggcggccccacagataaatatcttattctggagccaggacaagagagggtttcagaacggggacaaatgatgcagcttgcctccgggcccttctagcagtgacaacagaggtgtagtttccctatgtgtcatcaaataacatctgggaggacaggggtaaggaggatctgcctcccccacctgcaaagtccagaggtaaagtccctaggtggggcgagggtttgaggaaggaggaggtgtgatgttccattgcccaaaacactcaccctctaacatctgcagaagagctctccagggcagttgtcacaaggggggatcctggggtcctgccaagtcatgaagctgagctgggtctagactccagggctcataattgctcaaaaagcccacctctacacacacacacacacacacacacacacacacacacacacacacacggaaagttctggaaggatgatcttcatggctgtctcttctgcaggacagtgctgaggactcatcctcaacaacagtgcctacttgcactcctgtgcctaccacagtgtagacacaaggagagaatgcccaagaaaatgatcagtatgaataaatgagtgaatattacataacagtgcagatcaatggcctcttctttctctgcctccaaaagctcccagctcccccttccccatgtgagtttgggggctttattgaggggtcattacgattgtgagtgcttctctctgcctccactatccctacttccccttgctctcatcaggcaccccagaatatggactcagggatggaatcactacaaacagtaggagaatagtgtgagtgcctctccagctgaaaggagatcatcaaaccaccctttatggcctggatgggggcgggggtggcgctgtgcaaccctgggcaggtcacctagacactctaagtctcaatgtccttatcagtgaaaaggggacaacagtggcttcctcacattgttgggagggttgaaacatgatgtgagcagtcaccagaactcacgtgggcaggcccagctgctgcaattaccatttcctccggtagaggacactcgaccccatcctcagcctgctatgagggcggcaacacccttctcaggaacctctcctcctcataggagaaaaagagggacaaggctggatgccgggtcccatctaacacttccagagtgaaggctagaaagggcccctctggatccagaagccagcccttccctttccttggcccatctaggtctcacctggggcagtaaggactgtgttcaaggatttgggagcaggagacctgcccggttgccccttttggggaactgcaccccaggcgtccaaccccatagtaacttctgtagtacttactgcccagtctctgttctaagaactggatgtcacttaatccccataacagcctatgaaatagaccttttttttttgagacagggtctcactcggtcgcccaaactggagtgcagtggcgcgatctcagctcactgcaacctctgcctcccgggttcaagccattctcctgtctcagcctcctgagtagttgggactacaggcgcgcaccaccacgcccagctagtttttgtatttttagtagagacgaggtttcaccatgttggccaggatggtctcgagctcttgaccttgtgatccgcccgccttggcctcccaaagtggtgggattacaggcatgagccactgcgcctggccgacactatttttaaaagtgaacataccacacataacccattttaagtgtccaattcaatgatttttagtaaatttacagttatgcaaccatcatcatagtccagttttgggggtttttttgagacagtttcactttgtcttccaggctggagtgcagtggcacaatctcagctcactgcaggcttcaccccccgggttcaagcaattgtcctgcctcaacctcccaagtagctgagactataggttcccaccaccacgcccagctaaatttttttttttttttgagagtctcactctgttgcccaggctggagtgctcaatctcagctcattgcaacctccgcctctcagattcaagcaattcttgtgcctcagcctcccaagtagctgggattacaggcagatgctaccacgcccggctaatttttgtatttttagtagagacagggtttcaccctgttggccaggctggtctcgaactcctgacctcaggtgatccgcccacctcggcctcccaaagtgctggaattatgggcgtgagccaccgtgcccggccccataatccagttttagaacattgcttataagactcctcctccccacttgtagctctcccttcccatccccagccctgggtgactaatctttctgtctctatagagttcccttttttggatattttatataaatggaatcatgcaatatgtggtcttttgcatctggcttcacaaaagcataatgtttttgaggtttacctgtgttgtagcgtgtattggtaatctgttccttttttttttcttttgagatagagttttgctcttgttgcccaagctggagtacaatggcacaatctcagcttactgcaacctccgcctcctgggctcaagcgatacgcctgcctcagcctcccgagtacctgggattacaggcacccgccaccacgcctggcaaattttgtatttttagtagagacggggtttctccgtgttggtcaggctggtcttgaactcccgacctcaggtgatccgcctgcctcagcctcccaaagtgctgggattacagggatgagccactgcgcccggcctgttcctttttattgctgagtagtagtctgttgtagggatatgccacattttgtttatccaatcacatttgggtgtttttcactttttggctattatctataatgctgttatgaacatttgctatacacgtcttttgtgaatatatgtttttatttctcctaagtagacatttaagggtggaattgctgggtcatatgctacatttatgtttaaccttttttttctttttcttttttttttgagacagggtctcacagtctcattcaggctggagtgcagtggcacagtcagggctcactgcagccttgacctcctgggctcacgagatcctctgcctcagcctccagtgtggctgggaccacaagcctgagccaccatgcccagcgaatttctttttaaattttttttgtaagacagggtctcgctatattccccaggctggtctcaaactcctcggctcaagggattctcctgcctcagcctcacaaagggctgggattacaggcatgagctaccatgcccagctgtgtttaattcttttaaaaactgccaaggtcgggcatggtagctcacacctgtattcccagcactttgggaggccaaggcaggctgatggcttgaggccaggagtttgagaccagcctgggcaacatggtgaaactccatctctacaaaatacaaaaattagccgggagtggtggcatgtgcctgtagtctcagctactcagaaggctgagggtgaggaattacttgagtccagcaggtcaaggctgcagtgagccacattcatgccattctgtgcctgggcggcagagtgagaccctgtctcaaaacaaaacaaaactaaactaaaaactgcaaggctgttttccaaacgggctattccattttacattcctattaatatccatgatataggctgggcacggtggctcacgcctgtaatcccagcactttgggaggctgaggtgggcggatcacctgaggtcaggagttcgagactagcctggccatcatggcgaaaccccgtctctactaaaaaaatttaaaactaggccgggcgcagtggctaacacctgtaatctcagcactttggaaggccaaggcgagcagatcacaaggtcaaaagatcaagaccatttggccaacatggtgaaaccccatctctactaaaaatacaaaaattagctgtgcgtggtggcgggtgcctgcaatcccagctactagggaggctgaggtaggagaatcgcttgaacccaggaggtggaggttgcagtaagccgagattgcgccacatcaccccagtctggtgacagagcgagactctgtctgtaaataaataaataaataaataaataaataagccaggtgtggtggtgcacgcctgtaatcccagctgcccagattctcgggaggctgagacaagaatcgcttgaacccaggaggcggaggttgtggtgagccaagattgcaggactgtactccagcctgagtgacagaacaagactctgtctcaaaaaataaataaataaataatccatggtataaatgaggacattgagggagataagtgacttgcccaagttacactgctagcaagtggtagagccagaacccaaacccaggtagttgagtcctaagttagctctggtaaccacaaggctaccccacaacaatgaatccaagagggaagccatttctccaccctgccacacccagccaccatcatttaacctttcttggtcccagaattccctaagtcagcagggctgcatcaccccctagcataaacccacatgttcctctacctcctctgggaatttgcacccagggttaacagcttaagttctgggctcagatgggtcagttcacattccagacccatcattttactagctttgtgactttggggcaattacttaacctcaggaagctttagtttccttatttgtaaaacaagactagcatctttcctcatgcaattaaaaaggtattatatgatggaaaatttcaaacctacacaaaagtaaataaacataattaacctctgagtacccaatatccagcttcgacactcaccaactcatggtcagttttgtttcattcttacccacccacttcctcacttaaaaaaaaaaaaaatcaaattggccagtatgatggctcacacctgtaatgccagcattttgggaggccgaggctggcagattgttagagccaggagtttgagactagcctgggcaccatggcgaaaccccatctctaccaaaacaaacaaaaacaacaacatgtaaattagctagtcccagctactcaggtgactgaggtggaaggatcccttcagcctgggaggttcaggctgcagggacctgcaatcaccactgcactccagcccaggtgacagagcgagaccctgtctcaaaaaacaacaataacaacacaattttatttaggtatgatttatgtaataaaatgcacattttaagtgtacagttcaaatggttttgccaaaggaatatgcccatgttaccaccacaattaagatgtattatagccgggcgcggtggctcacgcttgtaatcccagcactttgggaggccgaggcgggtggatcatgaggtcaggagatcgaggccacggtgaaatcccgtctctactaaaaatacaaaaaattagccgggtgtggtggtgggcacctgtagtcccagctgctcggagaggctgaggcaggagaatggcgtgaacccgagaggcggagcttgcagtgagccgcgattgcgccactgcactccagcctgggcaacagagcgagactccgtctcaattaaaaaaaaaaaaaaagatatattatagaacaatggccaggcacggtggctcatgcctgtaatcaatcccagcactttgggaggccgaagcaggtggatcacttgaggtcaggagttcaagaccagcctggccaacacggtgaaaccccatgtctactaaaaatacaaaaaaattagctggatgtggtggctcgtgcctgtaattccagctacttgggaggctgaggtgggagaataacttgaacccagtaggcagagattgtaatgagctgagattgtgccactgcactccagcctgggtgacagaacaagactccatctaaaaaaaaaaaaagaaagaaagaaaaatataagatatagaacaaaccccaaaccccatattattttgttttgctttgtttgttttttagagacaggtcttgctctgttgcccagactggagtgcagtgatgcgacctcggctcactgcaacctctggggttcaagtgattttcataccttagccacctgagtagctgagactacaaacgtgtgccatcacgcacggctaatttttgtatttttttgtagatatagggtttcactatgttgcccaggctggtctcaaactcctgggctcaaacaatcctcctgccttggcctcccaaactgttgggattacaggtgcgagccactgtgcccaacctagaacaaaccccatgttatttttaggcaaatccaagacatcacataatttcattcctaaatatttcaatacatatttctataaggaccctttaaaagtaaacataaccccaacattattatcaaacctaaaaaaaattaacaattggccgggcacagtggcttatgcctgtaatcccagcactttgggaggccaaggcgggtggatcacccaaggtcaggagttcgagactagcctgatcaatatggtgaaaccctgtctctattaaaaatacaaaaaataatcagccgggcatggtggcatgcacctgtagtcccagaaactcaggagactgagacggaagaattgcttgaacctgggaggcacaggttgcaatgagctgaggtcacaccactgcactccagcctgggtgacagagtgggactccatgtcaaaaaaaaaaaaaaaaagaattaacaatcacactttaacttcatcaaatagccagtcagtgttcaaatttctaattatcttataatattttttctttacaatttttagtttatttgaattaggagccaaagaaggatttcaagtggttaatatgtctctctttttatctataaattccccctttatctctctctgtctctctttttttttttcctctttgcaatttagtcattggagatactacgattgtcttctagacttcccatagtctggaatttactggctgcattcccaccgtgagatttaatcaaacaatatttatggaacaatatttattaaggacctgctatgtatagtattgtcaaatttagcacagagctgggtgcactggctcacacctgtaatctcagcactttggaaggcgaaggcgggtgatcacttgaggccaggagtttgagtccagcctggcctacatgatgaaaccccatctctactaaaaatacaaaaattagccgggtgtggtggcgagtgcctgtaatcccagcttacaaaagaggaggctcttgtaagggaggctgagacaagagaatcacttaaaccctcgaggcggaagttgcagagagctgagatagtgccactgcactccagcctgggaaatagagcaaaactccgtctcaaaaaaaaaaaaaaaaaaaaaattagcacaaaatatacagaacatatttatttatactaaaaaacttacttattgtttatctataattcagatttgacagtgttttatctggcaactctatgtgccaggtgctattctagcactggggacacagcagcaagacagacaacccccacctcaaggagtttgtattctagtagattcgggaagccagctaatgcacaggcaaataatattccttctgaagatattgtgaggattaaagaagaaacctagcctaggcgaggtggctcatgcctgtaatcccagcactttgagagacaaaggaaagaggatcacttgagtccaacaagagttcaagaccagcctgagcagcaacatagcaagaccccatctctgcaaaaagtgtaaaaattagctgggcatggtggtgcatgcctgtgcccccagctacttgggaggctgggacaggaagatcccttaatcccaaaagtttgaggatgcagtgagctttggtcacaccactgcactctagcctgggtgacagagcaagaccctgtctcaaaaaaaaaaaataattattatccataggtaagaaaaaacatggccgggcgccgtggatcactcctgtaatctcagcactttgggaagccaaggtgagcagatcatttgaggtcaggagttcaagaccagcctggccaacatggtgaaacccatctctactaaaaatacaaaaattagccgggctcggtggcgggcacctgtaatcccagctactcgggaggctgaggcaggagaattgcttgaacccaggaggcggaggttacagtgagccgtgatcacgccattgcactccagcatgggtgacagagcaagactccgtctcgggaaaaaaataaaaaataaaaaatgagaaactcacgtattaatgcttggtgcatagaagttcatgatcaatgtaagtgcctttggcagtagcttaggctgccttttccctttcctcctttctttccttgtcccatccctctccgcattcacttaggaactattccagacttgcctcctcctgcagtacttcctccatatgaccatggttaattcattcatttatttacctcacagttactgagcacccaccatgtagcaagccccaggccaggccctggggactcagagatgctggagacgcagtctggtgggggagatggacattacaagctgatctaagaagtagcaatagagggatgatcatggtcctggaatcttagaggaggatgaccctagaggaagaggaaggaggtcttttcagagaacgtaatcttcctcctatgtctacaggctgaacaggagtatacaaaggaggcagggctgggcatggtggctcatgcctgtaatcccagcactttgggaggccaaggcagatggatcacctgaggtcacctcagatcacctgagaccagcctgtcaacatggtgaaacaccatctttactaaaaatacaaaaattagccatgtgtggtggtgcatgcctgtagtcccagctatgcaggaggctgaggcaggagaatcactttgaacctgggaggtgggagttgccgtgagccgagattgcaccactgcagtccagcctgggcgacagaatgagagactccatctcaacaaaaagaaaaagaaaaaaaaacaaaggaggcaggagagaagagagaagaattccacctgcagaggaatatgagcaaggaaccaaggcaagcaagtgcctgccccatgtgctgccaacttccagccatcagcgtaccacccctctgttaagtagcagggtgccctggccttggcctttctcatccaccttcctagagtcatctcatctcccttgcacagccaatcactctcgccatcaggaggtctctcccattaaaaagctaaatcttccttgaccccagaggctacagccctatccctttcttcccttcacagccaagctcccccgagagctgtctacgcacgtagccttccttttctcacttcccacttgctccccaacccgcttccatctgcttccaccctcgcccgccaccggaatagctcttgctgaagtctcggtggcctccatctcatcgaaactggcaggcacttgtcagcctccctgacctctccgggcagcccgcttggctggccacttcctcctccgagacatttccagtccccttctttctggacaccaagctcccttgctgtcctgcctctggggctgcttcctcttgcttttcagtgcaggctcactctccccttttcagcccaaaatgtcggggctcctcaaggctttgtccagaactctcttctctctccagacactcttccctgctcactttgcagtcagcattggagccccggggttcagcctggccctttcctctcaggtctggcccagacaccacactgcccactcagtccacctcggacatttcaaaagcccctcaaactcagccatcccaaaccatcagcacccactccaccccctcttcccaggaaacctatcctgaggtgtggctcccccatctattcacttccacagccagaaacccagtcctcatcccgacacctccagccctccaagtcaatgcctcagcaagactcatcataccccacagtcatctttccaaagccacaaatctgactgttacgcccgtattcaaaaccttttttcttttctttttgagacagggtctcactctgtcacccaggctggagtgcagtggcacagtcacagctcactgtagcctcaacttcctgggctcaactgatcctcccacctcagcctcccaagtagctgggactacaggtatgtgccaccacacccagctaatttttaaaattttttggggggccaggcccggtggctcacacctgtaatcccaacactctgggaggctgaggcgggcggatcacctgaagttgggagttcgagaccagcctgaccaacatggagaaaccccatctctactaaaaatacaaaattagccaggtgtggtggcaggtccctgtaatcccagctactcaggaggctgaggcaggagaatctcttgaacctgggaggcggagttgccaggagccaagatcgtgccattgcactccagcctgggcaacaagggcgaaactctgtctcaaaaaaaaaaagtttttgtagagtcggggtctcaccatgttgcccagtctggtcttgggccagctggtgagcaaatgtggtcccagctacttgagaggccaaggtgaaaggatcgcttgagcccaggagttcgagatccatctctacaaaaaaacaaaaatctgttaatggtttcctactgctttcaggagaaagaccagactttttttaattttctttttgagatggagtcacactctgctgcccaggctggagtgcagtggcacgatctcggctcactgcaacctccatttcccaggttcaagtgattctcctgcctcagcctcctgagtagctgggattacagttgtgcgccaccacacccagctaatttttgtctttttagtagagaagaggtttcaccatgttggccacgctggtctcaaactcctgacctcaagtaatctgcccaccttggcctcccaaactgctgggattacaggcgtgagccaccaagcccagcctaaaagactaaactcttaatttggctcacaggtagtgttacttaactctagcaatgccacacacaggtcttcttagggaaggggacagttcccttgcctcttccttcagccactcatgtcttctttaggcctaaagcaataagctccttcctctctttccctaagcacttgctgttccttcagactgtaaactttccccccacattgcttctcctggccaacgcctgctcctactcagagctccactgagtcatcccttcctctaagaaaacctctcttcgcccttccagatgatgcccaggtcagtttccacactatccccacttcaagagctgtgtatatttccttcaaagatttccactggccaggcgtggtggctcacgcctgtaaccccagcactttgggaggccaagacgggcagatcacctgaagtcaggagttcaagaccagcctggccaacacagtgaaacctgctctctactaaaaatacaaaaattagccgggtgtggtggcacgtgcctgtagtctcagctacttgggcggctgaggcaggagaatcgcttgaatccaagagacagaggttgcagtaagctgagagggcgccattgtactccaacccgggcaacagagcaagactccatctcaaaaaaaaaaaaaaaaaaaagatttccatctgctaatcactattcatctattagtgtatctgattatccacctctcctccctctcctccgccactctgtttcatggggacagggaccacattgaattttgcagtagcttagtaattggcacagagttggcaacccaatacactttttttttttttttgagacggagccttgctctgtcgcccaggctggagtgcagtggtgcaatctcagctcactgcaagctgtgccttccgggttcatgccattctcctgcctcagcttcctgagtagctgggactacaggcacccgccaccatgcctggctaatttttttttgtattttcagtagagacgaggtttcactgtgttagccaggatggtctggatctcctgacctcgtgatccacctaccttggcctcccaaagtgctgggattacaggtgtgagccaccacacctggccaccaaatacttttttatttttttttaagagacagggtctccatctgtcacctaggctagagtacagtggcatgatcatagctcactgcaatctcaaactctgggactcaagcaatcctccctcctcagcctcccaaagcactgagattacaggcatgagccactgctcacagccaacatttgctaaaagtgatttaaagttttcatggaagtttacccctaaatacttcaggaagttttcttactacaatatcatgatcataggctgcgtgcagtggccacactttaatccgagcactttggaaggccaaggtgggcgggtcacctaaggccaggagttcaagaatagcctggccaacatggtgaaaccctgtctctactaaaaatacaaaaactaaccaggcatagtggtgcgcctgaaatcccagctactcagaaggctgaggcaggagaattgcttgaacccgggaggcagaggctacagtgagccaagatctctccactgcactccagcctgggcaacacagcgagactcagtcaaaaaaaaaatacatatatatatatatatacccacacacacacacacacacatatgtatatatatgtttatatataaaatgatcatacctcagaaaattacccattccttaatatcatccaatatgtagcccatattcaaatttaccaacttgtcctccaaaatgctttttttgtatttgatttgttccaaccaagatctttatttacttatttattttttgggactgggtcttgctttgtcgcctaggcttctggcacaatcacagctcacagcaacctcaacctccaggcctcagcctcctgagtagctgggaccacagacgcgtgccaccatatccagctaatttatttatttatttatctatttattttattatactttaagttctagggtacatgtgcacaacgtgcaggtttgttacatatgtatacatgtgccatgtcggtgtgctgcacccattaactcgtcatttacattaggtatatcttatttatttatttatttatttattttggtagagataggctcttgctatgttgcctaggctggtcttgaactcctgggttcaagcaatcctcctccctgggcctccaaaagtgctgggattacaggcatgagccactgtgcctagctccaaccaaaatctaaatacggtctgcgcactgcatttcgctatgtcccttaagtctcatttaaatctagaataactttttccccctttgccattgacttggtgaactgctaaagtattttaagtaaattacagacatcatgtcccaccttctagatttctctgattgcttcctcatggtgttgtttatcccgtattttctgtaaactggaaattagatctccaggcttgattagcttcaggttgactatgctgacaaaaacactttgtgggtgaagcttcctccaacatattgcgttcccttggggtgtccctgatgcctgagtttcactgttagtgatataatattgatcagttgctccccttggcaacagccaatccttctatcaagaaattgcattttttggctgggcgaggtggctcatgcctgtaatcccagcactttgggaggccaaggccagtggatcacttgaggtcaggagtttgagaccaccctggccaacatggtgaaaccccatctctaccaaaaatccaaaaattagctgggtgtggtggcatgcacctgtagtcccagctactcgggaggctgaggcaggagaatctcttaaacctgggaggcagaggcttgcagtgagctgagatcgtgccactgcactccagcctgggcgacagagtgagactgtctctaaaaaaaattaatgaacagaagaaaagtcatattttacagatgaggaaaacagaggctctgcctcattcagtcactcgccccagaaagcagcaagagatggttaagacctaaaggaaggcagtggccacaggaacggacgggttttcaaaggagaatcagcagcatctgcaaacaactggctgtgttggggagggaaccagaagccctggcagaagcagagacttccctcacatctcgggtgggacatgaggagacagagcaacttggggggaaggtaatgagctcaggctccaggcttcccagatgtctccaagccgctctctagggaaatggtgtttataacatgacaatgtctataatttggcttccggcatgactcgataattagcttaagttatccctcattggcattttattcaaagcaaggacactcttccattcattctgatgaggcctgccttctgtgagtgttccagggtaagtgtgaactgagagctgtgcctctgtctcttttgactgaagtgggctggagactgaagttggtggggtggttgaagtgtctgctcactgggctcaagtctgtctctggggcttgaaggtgtgggctccccctcggacagggtgtggggggtgctgagacctgcacattcaatgcctagcaggagtttggcccagagattggtttccaagaggtgtgtgaaggaggcagtgaccaggaagatgggggatagatcccctgggaggcagtgtggaggactacaaccaagatgcttcaggctgaacagggctgtgctcaggggaaatgggaatgcttctgggttaggacgcattgaccaggttgattctgtgggactgagtggctgattcagagaaggagtgaagaagacagagttgagaaggcccccatgtctttgtctccagagaaagtggaggctagtagctgaggcaggacctggaagaggaagggtgggtctggggtggggagatgcggagcttagtttagatgcggagggagtggccagaggagacctggaaaaggaggcctgggactggagaggtgaggaccaggtcacaggcacacaggtcaaggttaaagccacagacatggataagctcttccaggggaagccaagcggatccagaagtgggcccctgtgggaggggcagggcaaaagggccctcgcaaaggtggctgggaaggaagagagtgagacttgagggcaagggaaagggagttttcagaggagggggatggtcatggggaccaaatgccatggacagggtaagcaggacagtgtttgaggagctactgaccttagtgattctgaagccttaggagactccagcttctcagcaaaaacagagaaacgagaggactcacttggtgtcagagccctgtgggccaagaagcagaaagtataatacaattgtctctcagcccggaaaaagcacaggaaacagcacccgctgggtgctaccagtgtagccactgagtgacccctgctagcctctggctacttgctcctcagaatagaccaggagggcatcagactggcacagcttgggccatatgtccacatcttggctgcctagggcttgaagacagaggctcagaattccttccttcagttctttctgtaaatatttactgagaacctagaatgcgccaggcaccgttctaggccctggaatacagcagcaaaatccacaaacatccctgtcttcatggcactcacacccgaggggaaagaatgacaacaacccacagacataaatgtggaaataatgtaaaagctgaaggacaaaaggaaagtataaggaagacggggagtatgggggcagcaggagaacagggtgcagtttttttgtttgtttgtttgttttgagacagagtttcactcttgctgcccaggctggagtgcaatgacatgatcttgactcactgaaacctctgcctcccaagttcaagagattctcctgccccagcctcccaagtagttgggattacaggcgccagctaatctcctcgtatttttagtagagatggggtttcaccatattggccaggctggtctcaaactcctgacttcaggtgatccacccacctcggcctcccaaagtgctgggattacagggatgagccaccgtgcctggcccagggtgcagttttaaatagggtggtcctgcaggacttggtggctcacacctgtaatcccagcactttgggaggctgaggtgggtggatcgtttgagcccaggagttcaagaccaactgggcaatatggcgaaaccctgtctccacaaaaaatgcaaaaattagcctggcatagtggcacatgcctgtagtcccaactactcaaagggctgagctgggaggatcacctgagcccagggaggtcaaggctgcagtgagccgagattgtgccactgcactcaagtgtgggtgacagagtaagaccctgtctcaaaaaaattaattcactaaaaattaataaataaataggatggtccagaaaagcctaatcgggaagggaggagcatgccaggaaacagcaaggaagctggtgaccagaggatgggggttggggtggaatggagaagaagctggagggattgggacagtaggttgcgtaggaccttgtaggcccctggaaggacttgggcttctctttggtttttttgtttgtttttttgacggagtctcgctctgtcacccaggttagagtgcagtggtgtgatcttgggtcactgcaacctccgcctccaaggttcaagggatcctcttacctcagcctcccaagtagctgggattacaggtgtgtgctaccatgcccggctaatttttgtatttttagtagagacagggtttcattgtgttgcccaggctggtctcaaactcctgacctcaagtgatctgcccgccttggcctcccaaagtgctgggattacaggcatgagccaccgtgcccggacctcaggcttccctttgaatgccatgagaacatctgggggactctgagcccagaggtgacctgattatcttacagcttaataggatcactctggccactgtgcagggaataaatggcagggccaaggatggaggcagggagaccagttaggaggtgaccacagtaatccaggggagaaaatgatgggggagatggtggcaagtcatcatattctgcacatattttgaaggtagagccaacaggatttgctgacagaatggatgtgggagaggagtcaggaatgattctaaggttttcagcctgaacaacaagaaagatgaaattgccatcagttgagaaggaagaggctgtggatgaagcggtgggtgtggggtgggaagggggaagcaagggtagatccagggttccagggcagatcacccaatggagcactcccctgacctaggaaaggggacactggacagccacaacttccggcaaatgcccaggacaggtggttcctggtgacctgcggcagagcaattccagcagggtgaggaggaaccacacagctaagtgtgctgcgcatgtggaggccgcgcttggtctcctgacttacgaagcagagcagagggatctgggagacacagagggtggtggcctgagcccatgtggaggctgccgggaagagccaggagagggagagagtgcagatcaggatagagtctccacatgagggaggagagatggatcccagccaaggcttggctgcaaaagcacagggtcaggctcaaggcactgagggcctggaccagcgtcagggagcagggggaaaggatccagagacatttgcgcagcagagatggccaggaagctgctggagagtgggaggagtcaggcgcaactccaagattttgaatcccaactcctgccagcgtcctgaaggcctctgtccccctctaagtccaggtttaccaaagcctgctgcaccctggagttctcagttctctgagcacggccccatacctgattctaaattcacaccactgcttcctctgcttttgttgcaagccacaatcagaggacactgttcacttgctgattccaatgccctttggcccctctatcccacagcccggtgatgtggctccttctcctgccctccaccagagcccccatctcagcaagggctttgctttctgtctcaaagagaaacacggtgctgagcgggggaagctgagcacaaaagagtacacataatacactcttaggaggttctagaagcagtgacacccacctactgtgacctacagtgatagaaatcagatcagtgctgtctggggccaagggactgattgcaatgggataggaagaaactttccaaagagatggaaatgttctatatctctaaggggtggtggttacacagctgtctacactggtcaaacgacatcacctgtacattgaaaacgtgtgcattttattatatgtaaattataccataataaagtttattttatttaattttaattcttttttgagacagagtttcactcttattgcccaggctggagtgcaatggcatgatctcagctcattgaaacctctgcctcccgggttcgaatgattctcctgcctcagcctcccgagtagctgggattacaggtgcacgccaccacacccagctaatttttgtatttttagtagacgtggggtttcatcatattggtcaggctggtcctgaactcctgacctcaggtgatccacccacctcagcctcccaaagtgctgggattacaggcatgagccaccgagcccagcctaataaagttgatttttaaaatagagaactaaatatttttttgagacagggtctcacccggtcacccaggctggagtgcagcactaggatcatgactcactgcagacttgacctcccaggttcaagagatccttccacctcagcctcccaagtagctgggactacaagtacccaccaccatgcccagctaatttttaaattttttgtagagacagggtctcattatgttgcccaggctgatctcaaactcctgggctcaagtaattcctcctgccctgtgctctcaaagtacctggcctaaaaaaaagaaaaaacaaaaatttttttttttagattgagtcttgttctgttgcctaggctggagtgcagtggcgcgatctcagctcactacaacttccgcctcccaagttcaagcaattctcgtgcctctgcctcccgagtagctgggattacagaggtgcaccaccatacccagctaatttttgtatttttagtacagacaaggtttcaccatgttggccaggctggtcgcgaactcttggcctcaagtgatccacctgcctcggcctccaaaagagctgagattacaggcatgaagcaccatgccgggccttaaaaaatttttttagggccgggcgtggtggatggctcatgcctgtaatcttagcgctttgggaggctgaggcaggcagatcacaaggtcagaagaccagcctggccaatatggtgaaaccccgtctcgactacaaatacaaaaattagccaggtatggtggcaggcgcctgtagtcccagctacttaggaggctgaggcaggagaatcgcttaaacctgggaggcagaggttgcagtgagctgagatctcgtcaccgcactccagcctgggcgacagagcaaaactccgtctaaaaaaaagagggtgggtctgagaggcccccttggaagaagtgagactagagcagggctgggaggtctgagaggctcccttggaagaagtgagataagggacagctgggaggcattccaggtggaagaggggctggttcactcacaggcccagaatctacagggccaccaaggaaccagcctgacagcagaggcaggtggggccactaagaaagttggggctgtgtggcccctctgtgaccacagttcttccttcccactccctttctgttctttgattcccctcctccaccagggcacacagttcccactgggcagcctgtgtaatgcgccccacatttgtgctttgaggctacagagcacttcccctacaccagggacctgaaacgtgtcctggctaagcatgttttttttttttttttttttttttttttttgagacagagtcttgctcttgtcacccaggctggaatgcaatggcaccatctcagctcactgcaagctccacctcccgggttcaagcgattctcctgcctcagcctcccaagtagctgggactacagacatgtgccaccacacccgactaatttttgtatttttagtagagacggggtttcaccatcttggccaggctggtctcgaactcctgacctcgtgatccacctgccttggcctcccaaagtgctgggattacatgtgtgagccaccgcaccccgcctaaaaaattgtttttaaagataaaataacagtctatcaagcagaaaaatcctacacacacacacacacacacacacacacacacacacacgctcatctcacacatacacacactcccatctgtccacatgctttgcttcctcccttctctctggcacggcagagcgcctcctcttgtccatgcaagctatcacgcctagactgttccccctaaaaaaaactcatgccacccttcctctgaccttgcatccatctcccctgctgtccttacagcccagcccctaggaaggatgggctatattccccttcagcatgctggatcagtcacccatctctgagacacctgccctgcagagacactccttctctcctttctgtcttctctcaggttcctaggaccccacttgcttgtatccagcgatggagggagagtttcaggctctccctccatgtctggatactccttctcatgctcccagcccagctcctctccctctgacacctcttcagtgccggcattccctgggcccctggacctggtcttctgctttccactctgcacctgcacagtctcccgtcatgatctcacctgctccagggcttcagttaccatctattgctgacaatgctcaaagatacctctgaatatttttttcagagtatcaaggatgtggcagaagaggtagacacaggatatatgacatatgcttcagaagctgtttacaatttttaatatgatatgtatactcaacccccttctgtcacagtccactggacctcaggctcagaaagccccaaactgaactcatcagccctttgccagccctgctcttcctcccttcctcaggattccagcttcaggcagaaacctgggagttaccctcttactccatgaccagcaattgtcaattatccccttctcttgatttcaccctctaaaactcccccttctccacccctacagacattcccagagaggttcaagcattcattcattcaataagtattagctgagcacctactctgtgccagacactgatcccgatgctcaaacacaacacataaaaatcagtgccctacagagcttcccttctagcacttgcagtaatttcaaaagcggctccatctttcattctaacccctctaactgcccactctgctgtggccacagcaaaagtcaccacatgtgcagctgctcagcatcttccatgggacttcatcctcctgggatcaagcctgggccatgtgtgaggtgtcctgatccccttcctcctgtcttctctcatcttcccttcctcccccaccaaacacttgtaccctctaaacatggtagactccctctgcaggtggtccatccccaaatataaggcatattgtactgcctgtccagcggccttcccttcaaccccaagcacctgcaggaccagaactgcttttatccttcctgcagtatcagtgcctggcccattatccggcacatagtcggggggtcaacaaatggtaactgattacatagatgacagtggattaacagtagtgtcacacagacagggagagtcttggggagcagggaaacatgagttctgaattagccccagaacacctccctgattgataatttagaccaaccccatggacacctagttaaaagggggggtgctagcggggcatggcagcttacacctgtaatcctagcactttgggaggctgaggcaggaagattgcctgacctgagtcaagatcagcccaggccaggcgcgatggtttatgcctgtaatcccagcactttgggaggccaaggtgggcagatcacgaggttaggagttcaagaccagcatggccaacatagtgaaaccccatctctactaaaaaaaaaaaaaaaaatacaaaaaaattagccagggcgggcgcggtggctcaagcctgtaatcccagcactttgggaggccgaggcgggcggatcacctgaggtcgggagtttgagaccagtctgaccaacatggagaaaccccgtctctactaaaaattcaaaattagccaggcgtggtggcgcatgcctgtaatcccagctactcaggaggttgaggcaggagaatcgcttgaaccgggaagtggaggttgcagtgagctgagatcacaccattgcgctccagcctgggcaacaagagtgaaacactgtctcaaaaaaaaaaaaaaaaagtgaggtgcaaatcctacttttgcacctactgctctttcctcgccctagaaatttccacaggagcacagtcatcaacctacagaatgttaacaccaaggggactttcaagatctggtcacctgaccaaataccagagagggtaaccgctttgcccaaggtcacactgctggctggggcagggctgggactagagtagctctggaaaatgggaacaagaatagaacctatctcaatcttgttgcagggagtatgttacatgcttagcacattgcttggcacataataaactctcatcgaataggagctgttgctgttatcgttgctattatcatcatcatcatcatcacaggtgtccatccttgcctccaagttccttgcctcctgatcctcccatcccccagtgctattctccactatttcctccctttcctcccaatccatgatttcctcccttctcccctcccaattcatgtttggcccactgcagtcagcgtccaccaccaccagtgcctggaaccttccaggctgaggtcaccagggacctcctccttgtagaacccttccttccctcgacctctcaatggcatgtgaccctagcactgcttcctccttaaatgtccttgacttctataacataaactctcctgctgctcaggacatccggctctccctctcaccctctctgctaatccagacacaaatagtcaactgcctactgccataggcacccaacgtcagcacatccaaagcagtttgttaccagctccatcaccctgccccgctcctgggttctactgttcagtgtacagatagccccgtccaccaaataccctaggctgcaccaggcaagacaggggaggactcccagaggtacagcctaggggatggatttggtggatggggttcatctgaacatccttcttaacatcccacctttttttttttttgagatggagtctcgctctgtcacccaggctagagtgcagtggtgtgatctcagctcactgcaacctccgcctcctgggttcaagcaattctcctgcctcaggagattctcgagtagctggaattacaggcatgcgccaccacgccctgctaatttttgtatttttttttcttgagacggagtttcactcttgtcatccagggagtgcagtggcgcgatcttgggtcactataatctttacctcccggtttcaagcaattctctgcctcagcctcccaagtagctgggattacaggcacctgccaccatgcccagctaatttttgtatttttagtagagacgggggtttcaccatcttggccaggctggtcttgaactcctgacctcgtgatccacccgcctcagcctcccaaagtgctgggattacaggcgtgagccaccatgcccggccgcctctgcgcctttgaacatgctgttccccctgcctggaatgctcttctgccccttaactgcctgcaaactctccctcacccacttggtcctagttcaggccctccctgatcccataaactcagttacttcctccctgcagtatcagcatcattcatagcactgtcatagcccttttcatcctgaagttaataattccctatgtctgtcacccctactagctatctgtgtacctaccatgtatctccatgtatctgttaatactttcctatgtctgtcatccccaggtgctatctgtgtatctcctatggccagcccatgatgattcagtgagtgtctgctgaaagaccgaataattaaactttttcaacttctgtcctgatggtaagtataagaggagggatgaagattaggctgtaaggccaggcgcagtggctcacacctgtaatcccagcactttgggagcctcaagcagggggatcacgaggtcaggagatcaagaccatcctggctaaccggtgaaaccccgcctctactaaaaataaaaaaaattagccgtgcgtggtggcacgcgcctgtggtcgcagctactcgggaggctgaggcaggagaatggcgtgaacccagaaggcggaggttgcagtgggccgagatcacatcactgcactccagcctgggtgacacagcaagactctgtctcaaaaaaaaaaaaaaaaaaaaaaaaaaaagattaggctgtaagaggaactggtaaagtggaacacagcagggcaaatgtgctagtcaactgtcattgcttaccctggaaatttccccaggagcggagtcatcaacttacagaatgttaccaccaaggggactttcaagatctggtcacctgaccaaataccagagacggtaactgctttgcccaaggtcacactgctggttaggggcagggctggggctagagtccacgtagctctggaaaaagtttgggcagatgctatctcatcccatgaacttcttcccttcctacccattctgtctccccaaaggaggtccctgatgccctaacatggtcagggaactacctgggctcactcacagctcttacagcatttgctgggaccttggccaggtggagttaccaaaatcctgtagactggaggcagggggatccaactatcaccatattagagattggcaaactgaggcagctagctaaccgcagagggcaagatttgatattgagtactgtgttcctcctgtagaaagacctgagaagcccaaactcccacatatgcagagtcactattcacaataatcatgactgctgacttcctaatgtcagggaaatcccctcactcccaccagttcctcctgaaacagagcctccctccatcttgcacagggtgtctgacttaggaaacaaactgtacacccaccctcctaagccacccaggcctactagatagatcacctccgagtcataccctttaatggggaaatcacccttctttgtgccaggcacttgacatcgtcactgctcacatcagccctaaggttagtactacagtctgcgatggggaaacggagggtcccagataagtcactactaatccatggtcaaagcaagaaagtggcagggctgggactcgaacttaggtttgcctgactccagcgggtccccgcccaggcgggaggccctcccagctgaagcctttcgctgactagattacctgggggaaaatgacttaacctcttcgaacccccagaaggtcagaagctttgcttttgggggagaaaatggtgtgcaaacgagacgcgaaggaaacgcaaaccctcgggcgtcggcgcagcctcttccccgagcctgggtctgtctaatggcccagagggagaggtcgcacccccgacccctggcacctgcgaaaccaagcgcccggtcggctggcagaaacgaaacctcaacaccctccagcctcccccgcttggttcccggaaccggcgagccaggcttcgcggaaacttgcccggcggcagccgcctagggccccgggatcgccctgaccgcagcccgcagctccgggccgggaggtgcgggccggcgcggtcgggcccgagcagcagcgcgacgcgcgcttccgccccgctcggctccggcggcggccgcggcggccccacaatccccttctggctccggggacgggcggggcggggcgagcgggcggaaataattttctgtttggtcgtctctgccccagtcccttcgccgcgggacgcgcgagacgggagaaggtgcgggaagcgggaagcaggagcgggagcgcgcggccctggcacgcatagggcggcggagagggcacgagcagggattgagcacctactgtgtgccttcacgctttacaaaaggattttcgttcgatgttcactacagcccctgcccgggggtactgatgccccatttacagagggacaagccggatttcggagaggtgaagtcactcgccgaaagtcgcaccgccagggtctgcgtgacaccctaaagcagtgttcagttaccccggggagagcgcgatgaacttgaaccacttgttggctggttcctgctcttgctcgttttttgcggatcgacacatagtgggcgctcaggaaaataaatgttggaagcttgagattgaacttgacagctcgaccctaggtacccgccacgaatccagcccagcccgcggggcaccgggtttctccagacctcgcagggaacatttgcggatgggctggtagaggaggctcggacatcccagttccgcacccgcactcgaccaacgcgtggtagcggaacccctgtcgtagcgaggcacagactgggttcaagtcccgactctgccgatttcagcctgagtgactttgagcgagtcactttttcccgtcgaaacctcagttgctccatccacaaaatgggaaatatgaacagccaccctaaaacggtgtggggaggattaaacgaaacaacgttcccaaaactctaaacttacaaatgttgtctcccgtccatcccataaacttaggcgacaaacctggcgcagggtgacctgagacaaaggcttcccggcccctgtctccaagtcgtccatccctggggcgtaggcacgttttagtgagccctgtccggcgaaacccgaaactgcggccaccttggcagcggtgggccccaaaaggaaatattcaaatattctgaaactcgtgcatgatttaggactgacatttttacgtttaattttcttgcagttttattcttgctagtaaaggtaattcgttagaaacccttaagtgcagtttctcctctgtgtcttgtttaacttttcgtgttagcgaaattcacaaatttgaccaaggaaccggagcgcggccgtcctcgccgggattccggtcatcgcaataatctggctctcggcccctactcccaggcacggaggtcgaagagacgggcttcccctacaccgccctgtgtagatgtagcctcttcgtcccggcagccctccgagattccctgtgtccaccggagcgaggagaggtgtggggctgcagcccagaactcagcttcctggacctccccaaactcccgcctctccgggattaagggagtaaatccctgacgccaaagaccaggtcaaggacaagttctcccccgccctactcccccctcctgggcggggattcatctcccttccggatgaaaggtactaaagagccgacggggggccgcggcgggccccaggcccttgatgttccggttgaacaggtgctggtgaaaaggaggcggacccggcggaagagtctgccagggggcagtgcgccgaaggggaggcggcctcctccacccccagtcccccggcccgtcttcccttctcctctctgtttgcccctcccccgcaggaagcgttcccggccgcgaggtctttgaagtgtcgttgaagcccccagggctgccttctcccctacgccacccgaactcccgctgtggggggcgggtgacctttagtccccacgagtcgtccccctttaggaagtttttgggggtcagatctcacccccccttgcccacacaggttgggaagaagactttgggccgacgcccctcacttctcccccagacccaattgcagggactttagtcctctggagtgctgcgtgtgagttaccttgtgtgtctgtgtgcgtgcctagaggtcaagtgtaactggtgttcgtgagcacctcgtggttgcgggtctctaactctcgtgggtctctaagcgcacccgcggggctggagcggaggttcgtgtctctgggagggtcagtggtgtgactgaagctgggagttagctcgtgtctgtgggtgcctcggtgtgtgtctctggggctctgagtccctgtgcgtgcgtgtgtgtctgtgaacccgacaggaagctccccgagggcaggaatatgttttgctctctactcgatcccagcgactggcaacgagcgtttaataaatatctgttgaatgaataaatgtctgcgtgtgagagcgtctaccctccagagtggcctcggaggaaagggcccgagggcggccatccaaaaagacccccagacacggggtggggcgggggcgaacggcccgcgtcgctcccattcctcctagcgccccttcccccggtctccactccaaagtttccctggggctgaagaatccacccagagacgaagacttggcggagggggctggagactcggggacccggggcccgagacgggagtgcgggcagagggagggctcgggagcgacgacccagagccgtgaaacgaaaaagaaagcaggcaaagcagcacggagcgaaagagcgaaaagctccctaccaagccaggctttgttccctgaacctaagactttacccggcggctggcggcgggcgggccgggagcgagcgagcggaggcgcgcggccatggctgccgcggccgggcaggggggccgggggggcggcgcgtgagcgggtggcgcggggcggcgcggggcgggcgggcgcccgcgatgtgccactcggcgcctcccccgccgggctcgggctacgcggcggcggggcggccctaggagccgggcgagcggcgcggagggggcgagcccggcgtgcgagtctcattgttgtggggggggcccgtcggggcatgagggcgagagcacggcggggggggcggccagacagagcgagcgaggaggaggaggaggaggacgcggaggaggaggaaggaggaggcaaagaaaagaagcggcggcggcggagggagaggaggagggggcgaggaggcgcgcggccccccgctccctccctcccccctgacccccgacccccgccggccggccccccgccccagccccggagggagctcatgggagtatgaaggagatggtaggaggctgctgcgtatgttcggacgagaggggctgggccgagaacccgctggtctactgcgatgggcacgcgtgcagcgtggccgtccaccaaggtacgggggtggcccgcggggggcggcgggaccccgggggcggcgtgcgcggggcgcccccggccgcgccctccggagacctcctggggctcgcgcgcccctcccccaccccacctgaagggaagggaggcgtagggggagctccccccgcccggtcctggaagaccgggtcaggcattgttttcttgcctattgttccagttccgcgccccccaccctaagttgagggagtttggggagagtctagggagcaatgagtgaactccccacgccccacaccgcgggtgtcggggctgcctggggaatgtttacctgcgaggtgtcccctcccgcccggttattttggtcccggctcctggaggaagaggtcaaggggggggcgtcatcccccctcgcttccggataatgggaggagcggacttggaaagggaagagaagggtcccaggggagaagggactcctaaaatccgccggggaagagctaaggataggagagaggttgtgcagggggccggaatcgagaagagggaggcttggagtttcccccagcagcacatggttcgggagttaactccttgaggaatcttgccgagggcgcaggctggcatctcccgcctgcctggcacaggcagccgggcccccccttcctgggacatccctgaatgctgtggcccggggctcttcccgccacgctcctctcggttcccagcaccgcacctgccctcagccttgacttttaacctgattctggaatacttagaggtagaagatgaggtccctagaccccctacttctccgcctcgtccctcactggccctttaagaaatccccccgcccacaacaacaaaacgtgtttgacggtcgtgactgttgtcccctctggttttctctatttctgatgctgatggctggtccgaggaagaagctgggaaacaagtccagaaagggcgtggggggaggatcttctagaagtttaaggtcaaagactcagacttcccgccctgtttgaagtgcttaattgtgtggttgaaggctggtgttgggcggttgggcagtcctgctgtagagtgagtgacccgtagactggggagcagcccccactgctggaactggctctagtcctttggagtcaccgccttcccccagttaccctgggaaaaagccactggctgacagctttgctcagcgactgtcctccccaccctcagcttgctatggcatcgttcaggtgccaacgggaccctggttctgccggaaatgtgaatctcaggagcgagcagccagggtggtgagttccagactgcccctctccactcccctgcccctcccacacacctgagcgtctcaggttgagctaggggactctgaggccgaggctagggtgggatttagctctgtcacacagacttcctgtttcctgcacacctacctccaacctcatctctgcctcacgctcatccctccctctgccccacctcaggcatggggctttggtttttgtctgtttgaacttttttattatgggaagtttcctactcatatgaaagtaaagggaaaactataatgaatctcatgtccccttcctcattttcaacagttaccaactcatggccaatcctgtttccactgtagccccatccatccaccctagagcttagcatttcagcctgggaccccttgaacgtgttcagggagggtccagctcagcagatcccccaacccctgtgcactcttgcattggcagaggtgtgagctgtgcccacacaaagacggggcattgaagaggactgataatggaggtgaggcgggctcatctgctgaggtcagcagggccccctgagcagggtctgggaaggcaggaatggactgagttggggtggaggccgggtttcctttccctggctggcgctggaatctgatgggaaggctgtggaggagggaacagtctgcagcgtggggtcataaggggtggagtctccggcttgccatctgcagctgaggctacccccacactgccccaggctgggcacacgtggtgtgtgccctctacatccccgaggtgcaatttgccaacgtgctcaccatggagcccatcgtgctgcagtacgtgcctcatgatcgcttcaacaaggtcagcggccccccgccgtgtcccctaccagttccctcccatctatgggttcctccaacgctctcttcatccggtgtaatttgattctgtccaacgagcactgaaagggaacttgggaggtgggtaggtacctaccagtgaaccacccttctgttgacagacacactcatgctctggcactcaggtgaaatagtaggctcccctgcagtagttctgccagagggtagaccttcgcagttacttcattcattcattcgctggacacattttattaagtgcctactatgtgccagacctggtgcaaggtagctggcacacgctgttcggtgctgatcaagacaggtgtgctgcccgctcaatggaacgcaagttcttgcatgcgaagactataaatatcagtaaaaaggcaaagtaaatgcaatttgtgataaatgctgtgaagaaaataagacactaaaataaagacctggtgggggcttactttagaccagatggtaaaggaaggagacatttaggctgagacctggggcgtgagaaggagccagcttccaggagggtaagggcccccaggttccaggcagaagaaagcctgggcagaggcacagaggtgggcataagctccctagtgagcaagacagacaaaggccttggcctttcagagctaaccatccaaggactgtgctacccagcatagtagccatcggccacacgtggctacataaattaatcaaaattaaaagcaggctgggtgtggtggctcacacctgtaatcccagactttgggaggctgaggggggtggatcacctaaggtcaggagtttgagaccggcctggtcaacatgatgagaccccatctctagaaaaatacaaaaattagctgggcatggtggtgggcacctgcagtcccagctactcgggaggttgaggcaggagaatccctggaacccaggaggcggaggaggttgcagtgagccgagatcgtgccactgcactccaacctgggcgacagagggagactccgtctcaaataaataaataaaaataaacaacaattaaatacagtttagaatctagttcctcagtcacgctagccatagttcaagtgcttatagcccatgtgactggtggcatttgtcttggacggcgcagaccatagagcgttttcatcactgcagacagttctgtgggatagcactgatctaagactgtagagagcaaatggaatggagggggtggcctaaggaccatcagtagaacaggggctccctggaggaggggacgattgcgctgtgtcctgcagacctgttacatctgcgaggagcagggccgggagagcaaggcggcctcgggagcctgcatgacctgtaaccgccatggatgtcgacaagctttccacgtcacctggtgagacccctgtcccacccccctgccccccgggtttgtcctggatggccactgatcaggctcatcctagctgctgtccctttgatggtggtggcaatgctttggatggtcttggcttcgcctcagcagggggccaggagggtgagaggaaggtggctcatgtgatctgtggcctcagccgtctcaggctgccttctctggttagtgcccaaatggcaggcttgctgtgtgaggaagaagtgctggaggtggacaacgtcaagtactgcggctactgcaaataccacttcagcaagatggtgagtcctggcgaccagcgcatgagcgggtcagtcagctgtggtaagatggttagagggcatgggctctgggccaggccagtgcctggtgctaggaggacagagagggaaaaaacccagtccctgcccaagaggagctcttcattcgatgaggaataaagtacagcttcaggtgtgtggatcagagctagaccaagcagtctgtcccaaaagacaaagctcagaccctgcctgtcagagtctaggaggcttcaaggaagaggtagcatttaagctgagtggaggtggaaatcaaagtaagagccaacatttgtgtgggaggcagcatttactacgcctccgccttaggacaaagttcctgccatgtgttattttgtgtggtccccccaccaaccctaagaactaggtgtgctatattttccccattttacagatgagtaaactaaggctcactgaggtcatataacttatcttgcagctggtagatgggatttagaacgggcagcctaatttgaaaactcctcaggagcctgccaaacagagaaacgagtcccaggcagagggactagcgtggacaaagtcctgagaggaggaagggcatgggtgagcagcgggagaatggggtgtttggtggggaagaggcaggagatgaagtgagaaagcagagcccgagctgggcttgcctctgccccaggcttcaggggtccagggggaggctggaaagggtgctactctgtgtctgtgtttgtggagagacgtgtgtcccagaagctgtgaggtattctggagcagttggctgcagcttggatctacccccgagccacaggcttgtcaggcctgtaagcgggagagtaacatgatcagatttgttttttaggaagattaccctggcagccgctgtgaggctagatcagaagggctgaggctggtggccgggagacagctgcaagaagggggatggaggggtgaggctggatgctagaaccatttctagggagacttgcctaatcgtgggagtggctgagaagtaggagttgggggtgacatttaggatctaggctctagacactgggtaaatggagcttgaatacctggggggtgccatgaacaaggggtacagctggcttctgtagggggaacacatgtcctgatttgccccagacagtcccagtttatacctgttgccctggtgtaattattattagttcccctgtttcatttttgaaagtgtccaggtttggatcataagttacgtggtcaccgtggtttcagggtttgatgatagcttaggacaaggtagcgagcttggcttggtttgcaggagacaccatgtggagacatttagatttggtggatgtcagactcctgggcagggtgtagtggcagctccaggcttataaggctggggccgtaatcccaggttgtccacaaggatggatcaggcgggccacgaaagagggggccttgcagggtatggggctctgcaggtaggagctgtgtccaacactggggagctgcccactggtcagataaggcctgaaattagcccttgggtttggcagttgggaggtagctggtgaccttagagggagcagctataaccccggggagggtggagccatcaggctgggtctgtagtgaaggggatgggggaggcaggccctggctgggaggagacgcagcatgtgggttgtttgggttgtgttgatgtttaacttcccccctttcttcaagttaagggcagcatatcctttgggacaggagcaaccactgtgtttggtggaggggaggggccaggataaaggagaagagggtgatagctgagccaagtgtctggagggaggattggatatggagtgcaggggagcactggctccccacgagggtcccctgcacgccctctgctccagggaaggaggtagaaacgggccgtggctcagtcagccaagagggcaccatggagagaatgaaagacccgggccccagtctcacctccacctgggccttgctggggcccagacgcatccttgcctcttctgggcctcagtggttgactctgcacattgggcgagccagctggaacactctaggattttcaggctggggaacacccttctgctgagcagagcatcatagaggacatgaggtcctcttagtgacagacggggcacatggggctgacccccaggatcaggatcctctaaccttctggaagcgttccctaagcccgtgagaagagggtttgcaatttctctcaaatctctcccgcagaagacatcccggcacagcagcgggggaggcggaggaggcgctggaggaggaggtggcagcatggggggaggtggcagtggtttcatctctgggaggagaagccggtcagcctcaccatccacgcagcaggagaagcaccccacccaccacgagaggggccagaagaaggtagaagtcctcccccacctgccatcactcccacacggggacttggagactcacaaacatggctcaaaaagccatcatgaggtgcccttaaggtcttggccctgccttcttccttcctctgaggccactgagggcaggagggggctgaaatgaaacggtgggggggtgaggcgggagcttggcttccctgtggctgtgttagtggttcctctgggtcctccccatgacatcacagtgtcccccaggccccagacacatggctctgcacgttgcacacgtctccgcagtccagccatgtgccgcctagtaagtgctcatgcctgcattccctcgcgccacatagcacagcgtgcccagctcctgtccctctgtgcagctgtgtcccaggtggacacccttgcaggtgttatgttcacgcgcgtggtgctctatagcactggcgtgataatgggacaggctatttttagcaggcggggccgggggaagggctgttggctctcataggaacttgcctgaatcgctcctgcccagcccattatccagccctcctcagggagagatggtgcccacaaaaccccatccctaagggggtgtcagctccccatacccacatgtcatgtttgtcctcgcccagacagccccccagcacaatatctagtcacctctccctctccagagtcgaaaggacaaagaacgccttaagcagaagcacaagaagcggcctgagtcgccccccagcatcctcaccccgcccgtggtccccactgctgacaaggtactgctgcccaccttcaggagggatggtgtgtgggtctggggtggcagagggagggaggcgggggcgagaggttggtgagtcagggacctgggcaccctccccacagcttcaagttaatgccactcccctcctaccccataccctctactccttcttccagcctagaaggggccaccaatcaccgaccaaccatgggattgggagtttggggtgctgtctgccagatactcccatctgcctctgtccagagggcctcagccctgggctcttgtctgcagagagtgggggacggcactcaggcctgctctccaagttctagggcccctgtccccagagatcggtagaggacatcccctacgccccatcaggaggacacccaaagcttgtcacccaacccaaatcccactctgtgcaggttggaggggctgaaagttctgaccaaggtggcatggggggcaggcccctggacagtatcccgaaactcccactcatcccaccattcccagcagggcatggtatgtcaggcctgtctccagaaatgggcaacatctggctgagcgataggcaggccctaccctaggccagggaattgctaatccaagctggaacagccctccctgctccctacaacctgccctccccatgggaggagaacctggtagggtggggggagatggagaaactgctccctcctgtcaccattattgcccattcacctccaccccatctcagacggttggcagagttctgggcaccttagcaggaggttcaggtatcaggtttccagggtgatgttgctgtggcaactgccccagtaaacctctcccctgcttcccagggctcacctggagaccttgtcattcatgccctctgacctttccaggggcctgcaggcaggtggcaagaaatggccaggggtctgggagtttttccagtaactggatgtcccttggacatgccagagaactctgcccatcctcctccactcgccccagcacttcggctacccttccccccagcccctctcttcccttgctctcagaaccacatctggctcccttcagaactccagctgttgaaaagaacaaagaggaagacagagaccaggactccgcccgggaggggcagtgcagggtggctctcgtttctggtccagcctgcattcagcatttatctgttcagcacgattaactgaatacctggtcgctactaggaggaaaagggccttccctggcagcagcctgaagcacgaacgaactcacggcatgccaggctgtgttctagaaccaggagatggaggggcatatggagattagtccatttaatactcaaaataatccaattaggttggaaatttataaaccccatttaatatatgaagatgatggggcacagggaggttaagtaatttgcctaaaagcacacagctagtaaagtggtagacctgagattccaatgcagtctggcttgaaggcttgtgctcttcacctgcccacagcactgtctctgcagctgctgccactggacgtctcatcatttattgaccctataccatgtatctggcatcatgctgcttccaactcaccacatatgcatagtgctccctgtaaagacactgacacttatcgacgttgagactttgcacagtataacatggcagtgaggccaggcgtggtggctcacgcctgtagtcccagcactttgggagtccgaggcaggtggatcacctgaggtcaggggttcgagatcagcctggccaacatggtgaaaccctgcctctattaaaaatacacaaaattagccgggtgtggtggctggtgcctgtaatcccagctacttgggaggctgaggcaggagaatcacttgaacctgggaggtgattgaaggttgcagtgagccgagatcgcaccattgcactccagcctgtgcaacaagagtgaaactccatctcaaaaataaattaagaaaaaacaaaaacatggcggtgaagggcagaacccatcaggctcataccttgctctgcccgacttagagcccacgctccttcaaccaccaccctgccgctctctttggtttctggtgcctcagataggacagaacatttcagtgcagagtggcagctgttgacatgtggtcatgtgtgcacagttctctggaaataaggggacagaatgtcttgttccacctgaggtatttagggaggcttcagggaagagggacttccaagctggattttaaaggatgagagatttcccaggaagagtaaggataggctgtcctggcaaacgcttagtgtgtgcaatcaggttgtctaggaagagcatggggtggtcagagaatgggtggaaagccagggggccgaagtttggggtagtagctggagggctccaggatggcaccagagaagcccattctcctgtgggtcctcttctctgcctcgccacttccagcataggtcccgccttcttagacgccctaagtattcagtgaatgaatggaccaatgagtaaatctcttcagactctgggactgttttcatctccctcttggcttccatcttccctgcctaaggtgaaagacagacaccttcttgggttcagtgaattcccctctgccttacacccaggagtgccacagctgcctccccatatccctggtctaggagctcctggccactccctgcccggaagtccttcatgaaactagctgtgggctctcccagttgagctaggtcctgtgccctcctgcttcactcccacatcaggatcagcacaggcccaggcacctggtgttgaaccttcctctctcctctccttcaggtctcctcctcggcttcctcttcctcccaccacgaggccagcacgcaggagacctctgagagcagcagggagtcaaaggggaaaaagtcttccagccatagcctgagtcataaagggaagaaactgagcagtgggaaaggtgtgagcagttttacctccgcctcctcttcttcctcctcctcttcctcctcctctggggggcccttccagcctgcaggtgagtgtgggcatccgggaggaagctgggagcagggaaagccttttgtcctgagcttttctggcaagggactttgcatattggttttgcatctcatttacttctccattggttcaggataaagatggggaatcccctcctctccaaacctgcccccaaacccttccttcttgaaccagaactctcctctccccttcaggggccaccccaccaacctcataacagtattccttatcccctacatttgtgctgcaaggtacaatttttcaagaacccccattaacattttctcctataatcgctacagtcatctggtgaggccagtagggtgcgagttactctcccccattttattacaggtgggaaagctggaggggtcgggggtactcatcccaggacacagacagtggcagagctgagacaggaaaccaggcatccccattcgtggaccagagctctctcccgccagtacacgcgggagtgggagggagtgcggggatctggggtccagctgtaactgtttcccctctgtgcacagtctcgtccctgcagagctcccctgacttctctgcattccccaagctggagcagccagaggaggacaagtactccaagcccacagcccccgccccttcagcccctccttctccctcagctcccgagccccccaaggctgacctttttgagcagaaggtggtcttctctggctttgggcccatcatgcgcttctccaccaccacctccagctcaggccgggcccgggcgccctcccctggggactataagtctccccacgtcacggggtctggggcctcggcaggcacccacaaacggatgcccgcactgagtgccacccctgtgcctgctgatgagacccctgagacaggcctgaaggagaagaagcacaaagccagcaagaggagccgccatgggccaggccgtcccaagggcagccggaacaaggagggcactgggggcccagctgccccatccttgcccagtgcccagctggctggctttaccgccactgctgcctcacccttctctggaggttccctggtcagctccggcctgggaggtctgtcctcccgaacctttgggccttctgggagcttgcccagcttgagcctggagtcccccttactaggggcaggttagtgacccctggggacagagggcatttcagggcccagccagtctagtgaggaacagagcttacacatgcacttagaaggaaatgggatggataccactccaaaagatagagcacggaggagacagtcaccttcaggacatccccctctgcatgcgtggagtagaaaggattggggacagattgtcagaaggttttaccaagttttgggagggagattagaaaagctaggaattctgtagccctcggcagggcagtttaacaagcaggcgcagcaagcagatgtcacccaggcaggaagtgacatctttgcagcaagagggttagactggggcatgtagccagatcccggggagcactcgagctggggaggggctgtcagccacctggctgagcaggagtctggggtggagagtaaccacgtgcttccctctgtccttgtgcctgcaggcatctacaccagtaataaggaccccatctcccacagtggcgggatgctgcgggctgtctgcagcacccctctctcctccagcctcctggggcccccagggacctcggccctgccccgcctcagccgctccccgttcaccagcaccctcccctcctcttctgcttctatctccaccactcaggtgagacctgactcctgggctcctccttccctgggcaggttggggacagactgacagaggaccccagccttccatgggaattggagcaactgggctgagttgccatcagaccaccctccgggctctggacccctctgctccccagcacacccggccccctgcaccccggtacacacagttgtgctctagatccaagaataaccgccaggggattctacctccctcccttaggtgttttctctggctggctctacctttagcctcccttctacccacatctttggaacccccatgggtgccgttaatcccctcctctcccaagctgagagcagccacacaggtatgtgaatatctgatcccctctcccctttcttcccaaaggtcggacacccatcacctgcatgtgaccccagaaagaatgggagagctttctggctgccccctccctctggccattgccctccctgcaaaaacaaacaggccgggtgtggtggctcacgcctgtaatcccagcactttgggaggccgaggcgggtggatcacctgagatcaggagtttgagaccagcctggccaacatggtgaaaccccgtctctactaaaaatacaaaaagtagctgggcgtggtggtgggcgcctgtaatcccagctactcaggaggctgaggcaggagaattgcttgaacgtgggaggcggaggttgcagtgagccgagatcgctccattgcactccagcctgggcgataagagcaaaactccgtctcaaaacaaacaaaatcccagcgtagtggctcccgcctgtaatcccagctactcaggagactagcctgggcaacacagggagaacctgtctcttaaaaaaaaaaaaaatccacacacagcaaaccagggtacactttcaagttagaacccagcgagaaggcagggcagggaagttactgctccatctcacagaagaaaaaggcagagatggaagacttgctcaaggcaggaaatggcagacctaaagctcagattctgttctcctgactccaagcccagtgctttcaccggtgtagcgtgcttccccttggcttcgtagtgtgtcttgggatcagcgcttacggaggtctcaacctctccgggtatttacgagttaagggggcgggtcacaagcgccccgccctctccctggagagtcagcccagccccagaaagctaattggtgcagggagaccacctgtcaggctgggaggcggggcctacagccaggctgccgactcaggtaagccttaaaggggacaaatatgattccacgtttaagaacgacagagtagggtgatatatttgttaaaactcagatcaggattctgtggcccaaggaagagttttagttttgcctcctgataagggatctgatgaatgtaaaaagtcatacagagctaattatgataatagctgcagtcattaagggcttgctacatgctagctaaacccttcaggtaaacacttcacatttattaccttcttttaatcttaataacagtcacttcggagaggctggttaggagcccaaggtcacaaaagttgatgtcaggtttaagttcaatccaggtctgtcttgacctcaaatttctataactctgaagatcccaggaaaggaattgggcggtggatctgaaagaagccagacagtggagccttcagcccagaggaggaagagagcagatgcccggggtttgcctcccaggggcagggtttccaagccagggccctcagcgctggccttgaactgccagtgtggggttggggattcctggggaaagggatctgcggtgaggtcccaatcccatatccatctgggggcggggaccctgaggcagctaccactcctccacgctgatcccagccttcccttcttccaagagccagacctggaggactgcagcttccggtgtcgggggacctcccctcaggagagtctgtcttccatgtgagggaaggggcagcctggaggaggggctgggggcaggagggacacccgagggaggagggacggagagaccggcgtgggctggaacccctgggggatacgggagaagggccagaggagcctggagtggtcgggtcgactgaacccaggttccctctggccgcaggtcccccatcagcagcctccccgcactcttcgaccagacagcctctgcaccctgtgggggcggccagttagacccggcggccccagggacgactaacatggagcagcttctggagaagcagggcgacggggaggccggcgtcaacagtgaggaggggtggcgccggtcgggacgcctgccctagggccctaacagtcacctttctccccgaggtccccaagcttctttaaggttccgcccttaggccccgccccagccttgactctcggccaccccgggcctcacctcccatccctgccaggccacacgaccggccctggtccctcagcgccccacctttggccttcgtggcctccgggccccgaccttaccaaaccgcaacttccgcccttctctcctgacccgtgtggcctcgaccccagcctcaggctccgccccaggtcttcacacctgtggctccccaagtcccgcctctcttctcagagctcacctgtgtccctccttaggatggcgccgccttttcaagggctgagcactggctcccctccaggccccgcccccggtcccctggccccgcctccgccccctcgcccctccctcaggttcctcgctctctccgcagtcgtggagatgctgaaggcgctgcacgcgctgcagaaggagaaccagcggctgcaagagcagatcctgagcctgacggccaaaaaggagcggctgcagattctcaacgtgcagctctctgtgcccttccctgccctgcctgctgccctgcctgccgccaacggccctgtccctgggccctatggcctgcctccccaaggtgaggggatcctgcccagcccgggagagaggcccgtgccctgaagtccggactggccctgactgcagcctgtgacatccctcccacagccggcagcagcgactccttgagcaccagcaagagccctccgggaaagagcagcctcggcctggacaactcgctgtccacttcttctgaggtgggcgctacgaggagtggggcaggaaggagggggagactcaaggctctcctggtcccatctcttccccgcagctattggaggctgggcaatgaagtgactgactgagcaattgattgatccattcagtcctcccttaatcaagtaatatttatgaggtgcccacttagtgccagccattggctaagcaatcagtgagcaaaaccggcacagcgctgcttcttaagataggctaccccaagcaaagaaggagtaatcacaaactgggagatatgttagtgtggagagaaattgagggctgtgagagagagaacgggggagggctgcttctgtggatagaaagtggttagggaaggcctctttgagaagtatttgtgaagggtttattatagcgcctcacacaaaataattcctgtgtaactggtggcggttcgaatagcagttgctattgtgttgtggttattactggaatccaacaaactgggttcttgttctctctctgccatttattaactgtgtgacttgggcagtaataatcataataataaccagcattaattgcacacttgccctttgtcatgccctatgcaaaaattttttaaagcattcatttagtcttcatagtaagcctatggaataggtactactgttaccccccagcttacgagtgagtaaactaagacaggttgaacccaaggtcacccaagccattggattgtggacataggatttgaacctgagcctttcactttagctgtagtgcttttgcctgcagagttacttaacctgtgcaagaatcaatggcttcacccataaaatgagaatagcaagatagcacaggtcaagccctcagcccaggatctggttcaccagatggtcaccaccatcatcattgtccattattaaatgaggatgatgaggggcgctggactcccaggaaggggtcaggaaacatgattcgtgaagacaatttggattcttagccctcatccccggaccttgcttcttccagggtgcctgggggtgaagtgggggttgctgtgctctgtgagaatgctggtgggtgctgggccaggggccagaaaagtcatgctggccctctgacccctcccttccccctccctccccaggacccacactcaggctgcccgagccgcagcagctcgtcgctgtccttccacagcacgcccccaccgctgcccctcctccagcagagccctgccactctgcccctggccctgcctggggcccctgccccactcccgccccagccgcagaacgggttgggccgggcacccggggcagcggggctgggggccatgcccatggctgaggggctgttgggggggctggcaggcagtgggggcctgcccctcaatgggctccttggggggttgaatggggccgctgcccccaaccccgcaagcttgagccaggctggcggggcccccacgctgcagctgccaggctgtctcaacaggtgagggagagctcagccctgggaaggggaacagggtggggggctggctctgggaagggagggattttccccaaaacacccacaatccctaaaaggaaaaatggcctctggtctcacagggtatataatcctagtcacctcttggcctctaaggactccacagactgttagacatgtgtgtcctctggacggtagctccccagggacaaaagaattgttgacttcctgtcctgcactctaggatttccttctgggacagttcttctaaatcagacctgtatccctcttgctgcaccctatgagcacggtgctctaagatcgcacatccctgccttgcttcccctgggtctgagggagtctaggggcttgggattaggagcaggagtgtttccctggccctcccccatggtctgtgtgttgtcccccccccaccccccacccccacctcagccttacagagcagcagagacatctccttcagcagcaagagcagcagctccagcaactccagcagctcctggcctccccgcagctgaccccggtaatgcccctcccttccctgcctcaggtgccccttggtctgcctggaagggcacatctcagaggatcagggccagccaggagagggcaggagcaggcagagtgaggggaagctctaggctgggcctgtgggactggggctgggccctgtggagcatccatggcaggtaagggggataagatcatgcccaggatcccctgggcattgagaaagggctgctgtaatagccccaggtcgcatcctggtgaaagactctggagggcagcaagtcctcagttattcagcatttcagtcccagccccaaaggcattcaggggaaactccagggtctgagtggctgtgcaggtgacaccaccctcaaccacagcagcttctttgggtctgtctcctgttgggtcggctgaaactacctttggagaaaaggagttttactttttaaaaatgagggaagcagccgggtgtggtggctcatgtctgtaatccaagcacggaagactgaggcaggcagatcgcttgagctcaggagtttgagatcagcctgggcaacttggtgaaactgagtctctacaaaaaattagctgggcgtggtggtgcacgcctgtagtcccagctacttgggagcctgaggcaggagaatcgcttgaactggggaggtggaggctgcagtgagctgagatggcgccaatacactccagcctgggtgacagaatgagaccctgtctcaaaaacaaaacagggagttgaaaaaataagaaaaatcaacattttcatataaagaaatattagacaggaaaccaattcagctggctgcctgtagggaccagatgggagcaagaggagtaagttcttaaggtaaactttgatatattattttggtttctgggacattaagaatgctttgcctattcaaagcaaaataaatgaatcttaaatgatagaagcaaacaaaacaaaagagaaagggaattgaaaactttttttttttttttttgagacagagtttcactcttgttgcccaggctggagtgcaatggcatgatatcggctcactgcaacctccgcctcccgggttcaagggattctcttgcctcagcctcccaagtagctgggattacaggtgcatgccaccatgcccagctaatttttgtatctttagtagagatggggtttcaccatgttggccaggctggtctcaaactcctgacctcaagtgatccaccggcctcagcctcccaaagtgctgggattataggcgtgagccaccgtgtccggcgaattgaaaactattgacctagtcagtagttttggcgaaaccccgtctctactaaaaatacaaaaattagccggatgtggtggcaggcccctgtaatccagctacctgggaggctgaggcaggagaatcgcttgaacccaggaggtggaggttgcagtcagccaatatcgcaccactgtactccagcctgggtgacagagcaagactccgtctcacaaaaagaaaagaaaagaaaagaaaactattgacctagtttagtgtttttcaacttgggggcgtctgtggttgtcttaggagctgaggggtgattctgtgggcagggccagagatattaaataccctgctgttggccggcagtgctgcagctggcaaataccaatggcgtgcaaccattttcttgtctagatggggagacccaggctaagtgggaaatgcgagacagtaccttgactgtctcacaggcctcttgcctcctgattccagtgtgatggggtggggcctggccaggcagggcaggcaggcagcagggaagagacccccgggactgttggccaacaagcggtctggcccccttgcaggaacaccagactgttgtctaccagatgatccagcagatccagcagaaacgggagctgcagcgcctgcagatggctgggggctcccagctgcccatggccagcctgctggcaggaagctccaccccgctgctgtctgcgggtacccctggcctgctgcccacagcgtctgctccacccctgctgcccgctggagccctagtggctccctcgcttggcaacaacacaagtctcatggccgcagcagctgcagctgcagcagtagcagcagcaggcggacctccagtcctcactgcccagaccaaccccttcctcagcctgtcgggagcagagggcagtggcggtggccccaaaggaggggtgagtaaggggcccggggccttcctgcctcccctctgagggatgggtagagatggattgtcagaaggcttatcatcaggtacctcagcagggggaaggaagcaacccctaggtcagcaaagtaccctgcctcagaccccagggcctctgcttgcacatgggtgccctcctgcacggccaagaaagatccgatctgagcatgggctcagaggaaaaggaccaattagaaaacagccttcctccgggaggaccaattagaaaaagccattttgtttctcatccgaccaattagaaaaagatgaccctctgggtaggccaatgtcagaaaggccctctccctctcctgagggcacacggccttagcttgcacatgcccacgcagcccggtgctcttctgcagggtggtttcacacccctgcgcatcggccctggtgcacacccctcagagcccaggccagaggcttccattggccccgtttcagtaccccacagcagctttcttggcctaggaagctgttcttatctgggggttaggacctgacactttccacacccccggcctccctccctctctttccagaccgctgacaaaggagcctcagccaaccaggaaaaaggctaaatccacccttacccctcctgacccccccaagtggagggaacagatcctggcctgaggggtcctagcctggagcaggcgcctgcgcccagaccctggagagccttgacccagagcctgtgctgaggtccagggagtgtggagagctcctggtgtcgaggactgagactgagaggggagccccctccatctggcccccttccctttccgcactgtccgctttgtgaggctcagaggaaggacagtctgcaagcccgcctaggaggtccatccccagcaaatgttttggaggtccccccagagagcagagtgggccatggcagaagtagggggttggttggacctgtcacatgaaatggatcagcacttgaatggggagaagtggagggagaggccctgggcctgtccctgcggggaaatcttttatggaagaagggctggacccactttacctgcagtttcttcccagctcgggcagatggcagaagggaccccttggactttttctcgccatccctccccccagcgcaggggcacaagctgagcttgtaaaagcccacagatgttgggggctggagaaggggcaggagagcatcacactcagccccagcctcctcaacctcttggggccccgtgatggggaggagagggcaggtgcggggaggctctggccttccttggtgccccgccctttgtttgcactattggacttaggagtgccgagggtggggagatggagctgcccgtctcagtgtgtgagtgtgtgtgtgcgtgcatgtgtgtgtgtgtgtgtgtgtgtgtgtgtgtctgtctgcctgtctctctcctcctggacccagggcagccaagggcagggataggcgcagtggtcagatgaagcagcgccagagaggggacctcccagctcttatttgcaccctccccacctcaccaactttggtccctctctgggggcatgaatggttaacaaacaccagagcagtactccaatattggagagtcgctgggggcacagggctttgaatcagggtagtatcctgccttccctcccctgaccccacatggtctcagggcccccttagggccccctaccccactgatagcttcctccttctctggcacaaggggagccccagggcttgggggagggcgtaaggtggggggaaatgccactgcttttagcaaaagcctccctcccagaattagccagcttgcctcctgcaccccacccccaccaaccaggggagccactaagctgactaacaactgtcccctcacccaccagctatttccccagggtagagtgggcaattctcaccttcaaagagtccccgcctgcccaggcctttggcacagaggctgagtggacagtcaggagagaggcgagaggcaaggcgaagcctgtgtccctgtttcagttgcactggggttggagcccagggtaggggtttccagcttccccaggctccggccttgtcagtctctttgcatgtgtggatttttctgtgtgtgtttctgtttgggtttttgttgttgggttttttttttttttttaataaagaaaagaagatgtgtatatttttggcaacgacagaaacgtagtgcagatatatttttgcctgtgctgctcaactgttttttttttctgatactgaaaataatattaatattcctgttgataagactttgtaagatgttagggagctgataatggaggggggtgggaatccttcaaaggcaatttcttaggcacttgcaagggcttgggggagggggaggcagttgtgatgacctcagaaatactcactttttattaatgctaaatatgttagaaagaaatgatagcattcagcattttattcttcttaatctattaagctgtgtaactccctgccccaaaccactgaaaagaaaagtaaccttcaggccaggcgcggtggctcacgcctgtaatcccaacactttgggaggctgaggcgggcggatcacttaaggtcaggagttcaagaccagcctggccaacatggtgaaaccccgtctctatcaaaaattagccgggcatggtggcacgtgcctgtaatcccagctacttgggaggctgaggcacgagaattgcttgaacccaggaggctgaggctgcagtgagccaagattgtgccactgcactccagcctgtgtgagagagtgagactctgtctcaaaagagaaaaaaaaagaaaagtaaccttcagagattcttagaagagttgctcattcacacccacgcccttgcccaaggctggcccacttagagcgaaacttaacttttgtctggatgggaagagaagtaagtctaccccgaggttgccatgttgaagagtgagaggtccaagtgattctgtgcattgaaaccaagacaccccacccagaacacttcttccctccctcagcccaaaccaaaggctggggttctcatctccaagtggctgttctccaactttcccaagccgcttgcattccccagactggactactgtggcggttaggttagatttgaagacggggcccaggctgggtatgaacgggtgcagccctcttctcctcttcccccccacatctctcatgagagaggtagtggcatttccttctcagggagcttcaatgggaaaggtctcgaaagcttcaggaggagcagaataccaacgcagggggatggctgtaacgatctcaccgtctcctaacctcagtcccttttttgagagtgaatggtggagggtgggaagggacccagatttgtagatctctttgtctgggggaggggaaggatgtggtttgcagagcggaagcagagtttggaaacgcatgagagcagagcttcgtgtgttcccaccctcagtgaggaggtgtgagtgggtgagcatgtggagttgggtgttcccaccctcagtgaggaggtgtgagtgggggtgcatatagaggcagtgcctgctgtggggtcacaactggtgcatgccagcgccaaagggacctgtctttaggggtcatttcagccagctcctcccatcacagatgacagctccaagcctagaaggggctcagtgacagggccaggacaagccctcaggactgtggcctcctggcccttggttcccctgccccacaacatggtctccacatggctggctggctggctgtccctgtgtgtgtgtgacacacggtgtgagtgcagggctgtgcccggggtgggagggtgtctatgtggcactgactgtcttagctcagagctggtggatcctctccatggacaatgacactttaaggattgtcttggtttgtttttcctatttgtggggtattttccccctcaggctcctgggtctgctgctgcctcaaggtgtcctgaccttgaggctgatgaggggacccctgcctgtttcccccatactgagttctagggaggtgctcaccccagactcttaggaagggtctagagaaatgagaggagcccaagccaggggccagctccgagaaagggtaacctccacgcttctctctcccaaattggaaatgaagacaggttttcaaaggcacaggctccccctgccagcttctaggatcttccttggtgtgcaatgggccagttaggggtaggcagcttgcacccagttctcctttatctcaacttattttcctggggagaggtgcctagagggattgaggtaacttcaactgggaattccaaggaaggtgggcaagtagccttggctctctcccaccatgtccatcaggattgagagtgtgtctagctcccgaccactttgtcttgacctactgaaaagttgggaactgaggggtgccttcattcccctttgttcactttctccagctcaacttgggacttgggtggtgggactggagacctcacccctgctcccgtcccgccccctttctatcccaacctgtttccatgtagcagacccttcctagggagcagggaggggaagccacagattgcaaacccaggggctcctttttcattctttctaaaaccttgatatcctcagcccaaaggcgatgcccccctgccacctccaagcctggaattgtgcataacccggatcttgtatctttgtataacggatgttatttgtacgaagggcagttcgtaaacagcacttgttcttttaataaaagaatgttttgcaaaaaaaaaaaaaaaaatccgaagagcccctgcgtagtctcgctttatggaaggggacaggaggtgggtgccaactgcgggggtgtaggagggcgtgggctgcggcccttctgtccgcactcagcggcagagagcgcacagacgctcagcacacccgggcccaccacgcagggtgcatcagtccgtgggccccggccgtcgggaccctgacccgtcccgaggtgacgcgacgcccgcgcgcttgctcccagaagcgcggcctaggctcggccagcaacagcgactcctgggagggtcctgcgccctcgggggtgccccaggcgccgaggctgcgcgcggggcgttccaccgccaggcccgcccggcagggggcgccgggaccgaccgctcacgcccggcgtgctgaggaggccgctgggcgggcgccgtggtcgggcttccgtaccccgcccgcccctggcctccgccctcgcagaacgccgcggcgtcttccggggcctggcgggccggggaccgagggggcggggaggtgacccggcgggggcggagccagcgggcgggcgcggcgcgggaggcgaccatgcgcggcgcgggggcgatcctgcggccggcggcgcgtggtgcccgggtgagcacccccgccctgcaccagcccccgtcccgaaccccagccgggcccctgccagcccccactccagccccggcccggccgagcatcccggagctcccggcccgtcccgccggtgtctggcttgcctcagctcacaggcttttcccgagcgccagtccctgccaggacctccgcagccagcaccttctcttgcgacctttttcttaccctctcattcctccctcgccccttcagccctgtcacctcctccttcctagatggcctcccgtgtccttccctttccactgattttatttttccgtttccaaaccaccgtcttgtgatgcctgccatgcttgcgtaccttgcaggacctgaacccgcggcgggacatctcctcctggctggtgagtccccccatcctcccctcctcctcgcacaagacccccaggcacggagatctcaaaggcagaaacaggaaatggagctaggaagagtacaggcctattccctggagttagcccgtggctctcagggaggtggggcggaccagagggcactgggcagggcgccagtcttctgtactgaggacagcagcacctaatgaaccaagccccagtgtgggtggccctgccgtaggctggaaggatcccagcccgccttccctagcacgcaggtgggagccagcgtttgagggaaggcagctggaccctgaaacctgagtgcctgcatggctttgaaatctccctgtccaaagctcacggtcctatggtgtcctggggaacggtcttgttgggtggcatcagatcagcctcttgtagaggaaacctgccacacacacaggccagtgggaaactaggaagggtcgcaggccggacggtgcttccagggcttgagctaaccctgagcccctcatcttccctggccacaggcccagtggttccctagaaccccagccaggtccgtggtggccctgaagacccccatcaaggtggagctggtggcagggaaaacctacaggtggtgtgtgtgtggccgcagcaagaagcaggtgagacccctgtctgccttcctactgatacctctggctaggaacagcctggtgtctccagtgagttcccacccaggatgatcttattcttcccacacatacctgagggacaccaagggggcttgggaacaaaaggccagtgccaccagcaaccttaagctcactgcatctaccccttgcaatgaagccagagagacagaaactcagtcacgcagccagcctggtgtggccaggcttccagtgggctcttctggagctgtttgtttctcagaggtgcactgcatggcgaagctcacctggcccttccctgtctccttccaggaagcgcctgggccacagattcccaggccttgaaccccaaaagcctacagcacctggtatttcctggcggtcttccatccaagtactaaccaggcctgaccctgcttagcttccgagatcagatgagattgggcgcattcagggtggtatggccatagacacattgggaagagattctgctcaggctctcctgcctccaaagcctcccagccttcccctgtgcccctctctactcttcttccagaaaactcttccttctcagtttatgggacttcctggccgcttgccacagtttgctgtcttctcagcttcactgcctgccccacttgcttccccttctgcccaggagcctttcgtcccagcaggaacctgcccatattgtttgcctccctggcccctttccttcctgagcagagctctgactggtattccttcaagctatgtggcatggtgtcagcagcccagggtccttgagtcccacttaggtccatgcacctcaagccctctaagacaagttgctggtttctatttgcacgcttctctcatctcctttccatcccaccctaactccaatgtcaagaggccttggttcagccaggcgaggtggctcacctgtaatcccagcactttgcgaggccaaggcaggaggctcttttgagtccaggagttcaagaacagtctgggcaacaaagttgagaccccgcttctacaaatgcctctacccccaccaaagactagcatggaggcaggcctgtgttcccagccatactggaggctgaggaaggaggaccgcttgaccccaggaggttgaggctacagtgagccgtgtttgcatcactgcactccagcctgggcaacagagtgagaccctgtcaaaaaaaaaggccttggcaccagctctgccttcagctagcaaggcatgtcacctttctgggcctgtttccattacccagtctctgcttgagcggcttctgggatggggagtacacttctgtgccagccagccagtttgctatggggcatcccctcctccttgtaaccttcactccctgtcacgtgcccagttattccctggagccaaacaaaattgctaccacagtgtactctccagcccaaagaagttttaacccaggaacatgggaagtaaatgaatttcatgatccagtggagactcagagacacacacacacacacacacacacacacactcacactctattagtgtcctggccctctgggtgtcccagagactaatgctataaagactctgtaaatacttaccagacacttactataggcaaagtgcatcacgatcatattttatttcctcatacaactctactcttatcacccccacattacagataagagaggtcactcagtgagccttggcagtcttgctctggagcctgtaccctaaccactgtgctccactccccctgagctcctgcagcctgccctgccctgccccagcaggtggggtcaggtctttgactcctgtctttcccccaccagcccttctgtgacggctcccacttcttccaacgcactggcctatctccactcaagttcaaggcccaagagacccgcatggtggcactctgtacctgcaaggccactcagaggcccccgtactgcgatggcacccacaggagtgagcgcgtgcagaaggcagaagtgggctccccactctgagggggctgctgctgtccagccacaggtggccttggctccaggcctctgacaggcacccccttctgtgggaaaggaaacaggtgctgagcccaagagactctggtacccactgctggctcatgaaggaagaattattccttataacctaaaagtctccagtctggggcaggcgggagtgggccctggttcaatgtttgctgatggggaagatggcaaaaacaagcctgcccaaccagactggtagtcctgcagtcactgctatgaggcccacgtgctgcctcctgctccagattttaacctctctgtgggctgggggcacctgaccagccacaggagagggcagttcagattcattctgtatggggtccccaagccaggctaaacccagagatgagaggcacccttcccttcttccctccaccccaaagaactacaggctccagaaagtatgcagcatttattacaaagccaagagatacagatgtcccagggcaaaggagggtacagtcacaggacctcagacacaggacaaggtgcaaacacagacaagcccatcagggggctcccaaccccacacacctacgctatgatggaatctcgagtctcgactcccgactcctctcagatctatgcacacttgaggaaatctcggtgggcagcgacctgccagggtctgtccctaaggaggtggtccgctgacctctcaaggggtgggggtggggtcagagcttacaggtttctgtcttcttgtgcttttagatgcagttgctctgtcctgaccaggtgaccgggcctcagctgggggtggaggggcaattggaaggctgtttgcctctggcaaagtctgggatctgtgcttgtgtgaggttaacccacccccacttccactctaggccccaggtgagactccaccaccagtcctgctagtgagggttccccggtgagggtaaggttggtgggggtgcagcgcttcacaatgctaaagccttagccctcctccaagagctgagacctctcagggcctgaatcttcttttccacaagataaatgatgcaaaggccacacacacaggaaaaaaaaaaaaagaggcagaactatctattctttgcacaaagtttccactgcaagaggaggaggtgatgcaggtgccacctccaccctgcacttgctcctcagaaccagggataaactgcatttgtaaaaggcactgttcttagcaatttctggacattcaacaacgtggggggcggccactggtcagaggcaggacagcagccaagatggggagagaaacggggagagaaagaaacgattctaactgactcctatatgcagccagttggaatcatgcctaaagctttgggtctgaaggggcccccaacacaccacctgccttgggaaacagcgaggatggtgcagagctttattgagactccagtggcccatccagttcatctccaggcacccccaaaaacagcaaattacacaagaccccccccaaaaaaaatgaacaccattttccacacatacacacacacataaagtttgtttcctgtggcatttaaattaatctggttggtccatagaaaataagtatgtatatttggtttttcctatgtacatatatatatatatttatttataaaacccgccccccacccccaaggtgggaagagctggggaaagtagaagaggtggaaaaaagggcccagaaaaagtggaaggagtggagaggcttggctggaagaagggagagggtccctggcctcaagttaaggggggcacgggagcgccgttgacagtcatcttgcgccccctgctggtggaggatggtgtctgcaggcagttcaagctacccccgttggcagctgtggtggccccactggctgtcgaagggggagtgggggaggtagggtgggtggctggaggcccatgggaactgggagagccatgggatggggtggctgggctgggcagggaggaggaggtggctggcagggtggcagggctgggagccttgtcgctgactgactcacactcggacgccccgctggtgttggtgccctcggagggggtgggcaccgtggctagggtgagccgcttgcaggctggctggacacggtacttgagggggagaggcccgttctgcggggagagtggggaggagagacacagggaaggggaaggtatcaggagacagagtccaactaaagggccaccatctccaccccacagtgtccaaactcgaaaaaagggatgggatggggccttggagaggagagagacaaggatacagggtgcatgaagacccagagagggaaaaggtctaagagcagagactccgtcagagaggagacgggagagagggaggcaaacacacggcagctgccagcacctatttctgcccccaaatctggggacaccgtctgcccagggagccttgtctcctgagcggaaagtcatccgcaagagatggcccagaggctgacctgctgtagcaagccaccctggacatgcagctcatgggataagggacagactgtctctgattacagaagggtggcccatgtggccacagacctatgccagaccctgtgggagtctgctccctgcccgccccactcgctggctcacccgccgccaggggtagatgtaggcgatgtccatgagggtgtagtattccttcagtggctcgtcctcgtacagaacctccacctgggggagggaagcggaggacaccatgaccctggccagctcggggctccaggctgggaatgtgggggactgggaggcggggcaatgggaagggtggatttacagatggtcccttatttctctgggatttcactgtggatttgacttccctgtcagagttgttccaacataactcctgaccaccaggcaggaagggttccagagaagtttcccctattgttagcagcctctggtcccaccatgcacacagctgtctgggtctcctatctctggcaggtcgcccagaggagctgaaaaggctcagggggatctcctggaactctggctctcacccccagctgcaaaatggaatcacccagggagctttaaaaaacaccaatgtggccgggtgcggtggctcatgcctgtaatcccagcactttgggaggccaaggcgggcggatcacaaggtcaggagatcgagaccatcctggctaacgtggtgaaaccccgtctctactaaaaatacaaaaaattagctgggcgtggtggcgggtgtctgtagtcccagctactcgggaggctgaggcaggagaatggcgtgaacccgggaggcggagcttgcagtgagcggagatagtgcccctgaactccagcctgggcgacagagcgagactccgtctcaaaaaaaacaaaacaaaacaaaaaacaaacaccaatgcctaggccaagtgcggtggctcaagcctataatcccagagctttgggaggccgagaattcaagaccagccaaaccaacatggagaaaccccgtctctactaaaaaaacagaattagccgggtgtggtgccacatgcctgtatcccagctactcgggaggctaaggtgggagaatcgcttgagcccggggggtcagcagaggttgcggtgagccaagatcctgccattgcactccagcctgggcaacaagagcaagactctgtctcaaaaaacaaacaaacaaacaaaaaaccaaaaacccaccaatgcctggctaggtgcggtggctcacacctgtaatcccagagctttgggaggctgaagcgggtgggtcacttgaggccaggagttggagaccagcctggccaacatggtgaaaccctgtctatactgaaagtacaaaaattagccacgtgtggtggcatgtacctgtagtcccagctacttgggaggctgaggcacaagaatcactttaaaccaggaggtggagattgcagtgagccaagatgatgccactgcactccagcctgcgtgacaaaggggaaacaaaaaaagcaaaaacaaaaaatcaatgcctgcatcttacccccagaaattctgacttaactggtaagatgtgagttaactcatgagatttaacaggcaacagtttaggatccactgtcctagagtgtgatccatggaccttcagtacctaggagcttgttagaaatatggaatctggccgggtgccgtggctcatgcctgtaatcccagcactttgggaggccaaggtggggtggatcacgaggtcaggagtttaagaccagcctggccaacatggtgaaaccctgtctctactaaaactacaaaaattagccaggtgtggtggcaggcgcctgtaatcccagctactcgggaggctgaggcaggagaatcgcttgaatccggtaggcggaggttgcagtgagccgagatcgctccactgcactctagcctggtgacagagcaagactccatctcaaaaaaaaaaaaaaaaaaggaaatatggaatctactaaataaatcagaatctgcattttaacaagatctccaggggacacatatacattcaagcttgaaaagctatgtcctggagctccgttggaatttcagactagccttcccacagccaaccagcctgaggaggccctgcgttttttgcactcacctctgccacagttccgagtgtgcaacatgcacacatacacaccgtcttggtcccatgcaccactgcacactgacttcaacacccctagactgcccccaatcttggtttcaaccacccttctgttaacgcatgggctcagttaaccgcgcaagccctgggtgacacctagccagctctgaccaatggctgggctgcacagactgtctgacacacccatacacagacactcattttttgaaaggcccagggacccaccttgtacttgctgggcacatccatcttgttgcggagaaacttggcaagatgcatgacggtcatggctgctgggcatcgcaggaagcgcacccctgtctgctggggcacaggcacccatggtaggggatccaccccaggccactccctcccagcccacattccagtcctgggcaggccccagcactcactttctctttgtccccatccccattctccagggggcccttcttctcgtcccggtccctggggacggagaaagaatgaagctaggaagacccaggaagaaccaggagacccaggaggatgatccctcaatggacacatccagagagggtcctgggtgggagaaggggttacccagactaggaacccagaaggggccagcctgggccagacttgcctggcaccttcgtagaattcgatggagaggctgacaatctcatcatcactcagagcccccttctcctgctccaagacctcgccgcggtcctcattggagccgttggggactgcagaaggaaagagctctcgggttggcggaggatgtaggaagggagcccgccaaggacccagagatcatgaactcagccaggtgagcccagccaccttctggagaggtgtgcgcggaggaggtcagagggtgaggggtagcgctacacacctacatggtcccaggcaagactgtgcacacacaaacagacgcgagcacactcaccctccgtcagggggtacgctgcatagaaatcccgccgccgtttcatctcatctggaagaaggcagcaggatgaggacagggccatgggttgggaaatggggtcagtggaggaggaatggagtgcagatacctttaaaaagcccagggaccaatttgtagacaatgtcttgaagtgttttgtcagacctggggaaaaatggacagggcttatcagcaatgccttctccagagcgctccgacctcgccctgctctcccagccagggtacccctcttcccacccccttcctgagaccggtgcccaggcattaggatccctgtgggtctggtctttgcccctctagtatgcctcaccctgtgatgagccaaatgtaaccccaaggtcggggagtagcccaggtccacaccccatgcttctcctacacctgccgccttggctgaaggaagcacggagcgtgggagggatgggggaggctgacccagaggatcgcggggacaggaggtgccgtgccaagcccacctgatgctcagcagcggccgggttttatggacctgcacgtcacacatggggcagtatttgttggtctccaggtagcgcacgatgcaggttttgcagacttgggggtgtggagagagagaggagagtcagagccaacttccaactccaggaccagcctccccgccctctgctcagactcagatatccctcctcctccaccctgtccctgctccgaggcccaatgtggcgatgtgtgttctgcacgtgtggtacctgtccttgtgcactgttgagggaagctggatcttgtgtgagacaggccagtgtcatgtacaatgcagaaggtcagccctgagtcccaagctccccgatggagtgggggacaaaagccagcgtgttcaagatgcctctgagtcccacccccctgctgccaagcccacagtgcaaacaaggggtgtccgcgtcttcagggcataaaatttcagccatttcaagaaagaactgagatttcagatgtgagtccttgaaatgaacttctgggctgatgccccgcgcccagtcgcccctgcgaggtaggccctctgtgacctaaggattcccagcagacacgtgggcgcgttggctctttagggcaagggtttgcgtgctaccttcctcaggccgtgcccgccccaatctgggcacagaggctgcccaccctgagcagctcccctccccccaactcacaggaatgcaggcactccacgatagtggtggcgtcgatgaagtaccccccgcagagggcacacatgaggtgggggttcagctctgtgattttgatccgtgtagtccgatgcatgattccggggtcgggggtggggggactggggagcgttgccctgggaaacggaagtggaatcagaaacccagagttggccgggcgcggtggttcacgcctgtaatcccagcactttgggaggccaaggcgggcggatcacgaggtcaggagattgagaccatcttgactaacatggtgaaaccccatctctactaaaaatacggaaaatcagccaggcatggtggtgggcacctgtagtcccagctgcttgggaggctgaggcaggagaatgtcgtgaacccgggaggcggagcttgcagtgagccgagatcatgccactgcactccagcctgggcgacagagtgagagtctgtctcaaaaaagaaaagaaaaaagaaacccagagcctcggcagcccctcttacgcttcactccacacctccccccaccagcacatctctccctgagcccaagacccttctctgccttcagggtgggctgggggtgtacatgtggctggttctttctggccacctctgagagttcattgggtgcccaggctctggagagtcacacagccttgagcaacaaggttaggcttcctctgagaagcaggaggaaagactgaagttaggccacaggatgtactgcccaactccccagagaatgtgaggaggcaggaaaatggaaaagaagagggtttttaaaactctttccaatcccaagtcgggcacagtggctcatgtctgtaatcccagcattttgggaggctgtggcaggaggatcctcctgcctcacgtgatcccttgagtctgggtggtcgaggctacagtgagccgtgattatgccactgcactcaagcctgggcgacagagcgagactctgtctaaaaaagaaaaacaaaaacaaaactctccaatcccaatccgtattcactcacatggtccacatttaaagcatcctaggaactaggaggaaacttagataaagcagccactggcctgaaacttcaaggaatagaagaagggaaaaataagttatccttactccctcaacccctccacccaggtgcagggcctcagacttgatccttccactacgtcccagcctcctatctactccatccattcactcctcctccaggaagtcttccctggaaacaccatggacacaggctaccctaagttagaaggccgcagccatcacttgtgcttctggctctgcatccagcctaagctttggagcacctccctcctctaaagtctgccaaatataggctgctcccagaaaatccaccatacgctaatcatttggcttccaggcctgagactcaggcagggaacagagagggtccttacatgcctgaagttgggaacgtgcagctccagccctagccctggactcaaagagtttaggcaaaaaggctatacccctgccacaggaatccctgccagtgtccctgatggacagccgcctgcatgagtgctccctgtccacaagcacacagggtccaggaacccccctttcatacacaatgcaggaatcccccccacatggtcactgttactctcccactgtctcctgccctggtgacgcctctgccacctgttcacaggctgtccagtgacaaaccacaggctctcacagatgcctgccaaagctgggcagaaagtgctctgtccccagaccgcctgctcgacaccagccaggcccgggcagggtccagagaggtgaaaagtccggctctggattggccaccgtgcttccttcttggtaaagaaatcaaaccaaacctgcacctggaagggacagcagccctccctcctctttcccagagtaaaagcccaggggtggggcttgggagggtggccaagccccaacagctcctttacaacatactcacacccttctctcctttccagaaagatttctaaagccaccacactgagttttctaggacaagaaattcacagccgggatcagcagtttctatagagaccccaggatgagtctggccaggacccagacagccaacagaggctcagggaacctggccagagaccgaaagagatgcagagacacaaaggccacatgtgggagagacaccaggttacagggcagacagaggggcacaagccagtcctacagcaagcccagagacatggcggagaggtggcggccccggggatctgagaagggagaggggttcccaccccacgcagggtggcctcggccagccctccctgcatgggtcccccctttgcaattacgcagaaagctgctggatactccactgtttggtcgtttccatagtaaccctgtccctggcaagatgcccaaatattattacaaccatccagaggagagaacaatccaagtggctgtctctctgagcgtgtgtaatatccatcctgtgtacgtgccatctgggcctccaaaggtacttcctgtgactgcctgtcagtcatatgtgtgtccagatgcatctatgtgtgtgtgcagagccaccaacaaacatgctgatgctgagctctgataatgcctggggtctctgttgctggggtaaatcgcatgccctcatctatctcccgttcaccctcatatacacatgcacgcgtacacacacatacacatgtaggctccgcacacttcacatcgtgcccgagccacctcattcacacactcgctgtgttttcaaagcagacacttgctcttttttttttttttttgagatagtcttgctctgttgcccaggctgaagtacagtggtgcgatctcggctcactgcagcctccgcctaccgggttcaagtgattcttgtgcctcagccttctgagtagctggaatcacaggtgcatgccaccacactggctaattttttttttttttttttaaacagagatggggtttcaccatgtcagccagccttgaactcctggcctcaagtgatctgcccgcctccacctcccaaagtgttgggattacaggtgtgagccaccacacccggctgacacttgcttttaagaagaaccccacagccgagagccccacactgcgaatggctgtacccctcacccagtcacttccccgagcatttctgagaattcagccccagcctgttcctctggaccctttctagacacgaggcccaaggtggtgctgactgaatgaaacgctgctccttctccagtttaagaaaataagccccttgccacactccctgctcccctcattccatccccacaggttctgactgttacctctggggctgggggtggggagaagcactgattggctcctcacctgattgccatggttacctgcagggccctgccagcaggtgccaagagcaatgtaaacaggagctctgactccctagagcaccctctccccatctccccaccccaggaggccccaggccgcgaattcctgatacccagttcctcccccgctgcactggctggtgtgctgtgagaaggtgagggaaaaaggggtgatgggtgactggaaatccagctgtcattactttgaggaagaggctgggagatgggaagaactcgagggagaaagagtgggagacacagatcccaagaaacagaaaggggaggccaagcaccattggaagtggcctctgcagagctcaggtgctttaacaggtcagtcccaactgtgtgtccacccctccctggacttgagcactgcctccacctctaacaccacttttccccaagcagaagccaagcccttcagtgtcttctgccattgtctttgcaagggtgtgtgtgacccttaggcagcccacattctgggccctgaggccctgggtctggctattgctaatgtggcaggaagggagcttgctcagcacccagcatccaaccccgacccctctttgccattcaagcctggcacttgtctttcccaatccttaaagacccctgctaagaaaacaccaccatctctttctctctctctcttttttttttctttttgagacggagtctcactctgtctcctaggctggagtgcagtggcaagatatcggctcactgcaacctccgcctcctggattgaagcgattctcctgcctcaacctcccaagtagctgggaatacaggcgtgtgccaccacacctggctaatttttgtatttttagtagagacagggtttcaccatgttggccaggctggtttccaactcctggcctcaagtgatctgcccgcctcggcctcccaaactgctgggattacaggcatgagccaccacacccagacccatctctccattttaaccagtgtctttctggaagccaccctgcaatttaggcctctctcacttcttcatggtcccctgtggaaacagtgggtctcccagccccaaggcccctgtgcttctctgatgccatagctctctctgctctccctgcctccaaatgaaatcagccccactccctcactagaatgtctccaggtcttgggaaaagtcactcaaggtcacatccagatgtctagaactgcagaggtgaaagggcttttagaaagcaccttgttcagctgggcgtggtggctcacacctgtaatcccaacactttgggaggccaaggcggatggatcatgaggtcaggagttcaaaaccaggctggcaaagatggtgaaaccccatctctactaaaaatacatggtggctcacgtccgtaatcccagcacttcgggaggccaagacgggcggatcatgaggtcaggagatcgagaccatcctggctaacatggtgaaaccccgtctctactaaaaatacaaaacattagttgggtgtggtggcacgcgcctctagtcccagctactcgggaggctgaggcaggagaatcgcttgaatccaggaggcagaggttgcagtgagccgagattgcgccactgcactccagcctgggcaacagagcgagactctgtctcaaacaaacaaacaaaaatacaaaaattagcggagcatggtggcaggcgcctgtaatcccagctactcaggaggctgagccagagaattgcttgaacctgggaggcagaggttgcagtgagtggagatcgtgccactgcactccaagctgggccacagagtgaaagaaactccatctcaaaaaaagagaaaaagaaaaagaagcacctgttcaatcctttcattttacagatgagcacactcagatgtgacttgtctaaggtcacaaagcaaagcagtggcagtcctgtgacaagaaagtgcctgactcccaccccagtgcttttaacatcctggcacctggccaggctcctcactcatctaaagcagtaatgcccggcttcatcccagcaggtgggaggggaaaagagcagctccctggagtggcgggaaaaccactcagtgggccgccgtctgggagggagtcagtctggcccaaacatgaccatcagcatggactcctgccttgaggcaggaagaggaggcacatgttaattgccttaccccacttcctacacatagggaaacagaggctgcagggaagcacagccagccagagtacagcatcaagactcagaccaggggttttatgactctgttcctctcccagcttcgtgggtccaactgcgcaagccccttgtatttgtgtttggggccgtgagggtctgcctagggacactgtgaacctcccaactttccccaatccttgacaatggcacaaagatctgctcccctgtccccaccatgcattgaaaagggcctcctgaagctgggcttactcaaccctcccttcctccctctcccacctctcaactccctaagatcaaacaaaggcaaaaccccaaaatatacacattgccagatacacacacatacagcaagacacacccccctccacctctcacactcactacacacaaggccagatagacacgccacaaccctcccccaccctgcgccacacacacacacaatcacagccagaccagagccaggcccaccctcgctacatgcagaagccatccacatccaccccccacctagaagcacacagcctgacatccctgcctggaaacagaccctgcaaacacacactaaccttttgtacgaccctggtccacccagggtaaattataacataagtcttccagcaacaaaagcagttcagcttccaaagtccgctctggggaccagaggctggagggctgcagtgggcatgtgacctgcacaaagctgtaccctcttcctgttcgggctctctccattcccatgacaacagctccatcaaccaagatctctcaggcaaggccaggggcagcagagtcccccttcctgcccaacccccaagacttcaacttgaaccctacctagctacacatggtctggatcctggggttggtttcctgcttcattccaaagtcagttctaaagcctcaatcccccaacccccaaccaggggagcccgtgggaaaaccttcccaccaaaaagctgcaacagagctggctttatgctcccagtaataacaccttggaccagagtgaaggggggagggaggagagaaattaaagagtttcaggaacagaaactgccagaggtcccagaggaggaggcatcagaacagagcggggaggggacaaccaggagacagccctcccctcgagacagacctctggggagactgaggcagcatgggggacactgagggacaaagatctcgggaagcgctgggtaacacttccacaatattcactggcaaatccacccgcctccatgccgcctcctcccacctcaagccaaccggagcgattatgggcagacaggggcagtgggggagggcgaggggcagcccgggcccaccgtggagacaggcagggggtgtctgcttgcccgggggtcccacgccctcagagctagcagtaggagggcgtgcgcagggtggggtggctgggcgtcccaggggaaggggggccagtttagcagatccccctgcttccgctggcgatgggaaatattgcgataaatttccctccatccccattctacccccagcgcccgggcttccccaggagcccatgtccaaggatcagggaccccagttaccgggtggccgctcccaccttccctagagccaaactttctgcggggccccgggaggggtgttccggagggaggctctgctgaggtggttcggggagggggcggggcgccggcgccgggacggggagcggggaccggcggggggaggtgcccgagaggacccggaccccggcggggaagggcgccctcccccggcctcgcggccgccccaaagcacatccccttctgccggccccaagtccccgcgcgtccacggcgcccctgtgcccacgggagagcgacccccgcccagatggaaaagggggtagaccgggcagagcgagaggcggctttggctcgtggggagcggcgacccaacccagcgcgcatcccgcaagccctcccggctgccccggaccttccccctcgctacctcggaacagggtctgcccgggggctgctgcacaaagaggtggtggtcgagggagacgccaaatcgttaagacggggagcccgtttcggccatcttggaagagaggaaagggaaaaagggacagaaaaaagggagaaagaaaggcggacggggcaagctgggctagggactgacggggcgcggggggtgcgaaggcaggatcggctcagagcctccccctcccatcggggcttgcgaagaacggccggcccccatcccaatccccagagggttacaggccaggagagggaaaggcagggggagtccgctccgcttacctgggttcggggtccggtgggtctcggggagggggggatgggagggagggagggaagggaggggaggggggccgcagccgtgtcgctcgcccgggcggcgggaggggagaaacctacggtaagaaaggagtttgtgaaagcggcttggggtgggagggagaggggaggggaggggaccgaggggggaggggagggaccggagtgtgggggggagacaaaatggcttttttcctccagacaagagtaggtcccgcccaccactcacccacgtgacctcattccttcaggatgctggcagagacgggaagaggagggggaggctggcgcggccgctccccgccaccggctgccgggtccctagccaggacgagacccctcccttcccatgcggccgccccgaccccggaggatggattctcttatgttaccttccgcagttagcccccctcccttcaaaatatgggttccccccactgacactgtgatgcccatccctaactggggcgcctggaaaatggtgaaatggggactgggctgaaaggtggctcgtggtcctccacgccccggcctagaccaaagggcgcggggctccggcgggggacgcgacgccttcagccaggcgtccgagcgattttcattcactccaagtgacactcccttaaaattaataactgcatctgggagggcgagcgtgtcctccccactccccttgccccctcggcggcaggggcgctggccccgaaaagcggcgcaccaggatccagcctgggcgcctggcagggagcaatcgcgagaggggagtggaggtgcggggtgaggccgggtggggggcctcgccgcggggggatcgggtagctctggcggaggctgcgcccccggcgtgctcgggcagagaagaacggaggcccgctgaggatgggaactcaggctccgggtctgggacacaataatccggccgaaggcgagcggccacactggactaggaaacgaggcgccgggctgtaaggtgggcccgcgccttttctcctgcctggcgctgattcccgcatttttcgctcgcgccctgcgctgcgcgctgcctgtgcgcctccctgggcgcgcgggcgggagagtcgggcgagcgccaagacggctgggcccgactcccactggcgccccggctccacctggcgctggggctccggtccgcagtggctccggcaggagggagagaacgaggagggaggcttggaaacgccgggagtagcggtgaggccgacgccggggaagcgaatcgatactgcgttactggacgcccgtgggcctcatgaggatggtcgattccctcattcgttattcacgatttattagggatggcggccgcgtctgtccctccagagagctcgattatccatccggccagcagcgccattaagcgcactgacggtgggaggctcgagttagaaattaggataggaatcttcgcccagttttggagcgcctgcctcctcttccctcgttgctcgcagccaaggcagccgcgaagctgggggcctcgggtgaatgctttcgccctctggccggcgaccaggagacctgcgcacactggccgccgagtgaccccagctcgagcctgcagccacaccagcgggacgggggcggggaggaagaggaagggcggagagacttccttccagagggagtggtccgagaaccggcgggagaagggccaagggaagatccggtcacctgctccggagcctgcaggcggagaggcgagtagttcaccggccccggaggaaaggggaccctcccactgttcccaggcaaatgtgtcgccggcatcctgcactctgccggggaagacgcgcatccactcgctctgcagggaggggaacgcgggaaggactcccagtcagccgcccctctctggctacaagaccccgaacaagagaaacctgtaacaggggctctgcggagatctggatcccacccaccaaccacatgggcacctggggggctgcccctcggggcattatcagccagtgggaagggggttgacgttcctctgcggcccatgaatcctggagggctgcccgaggggccaccggggtccatccacttattcttcggttgttaagcgccagacaggagagaaccgctagagaggagtgtgctaagaccctattacccactaaaactccattttcatcttttgcgtcctggatgactagtctccacattcctggcctttctggtttctcaggagaaccttctgacccaactcttcccacatcgaaagagtttcctagtcttttgttctactactagccgacatagaaagcacctgtcatgtgccagtgtcaaatactgcgctaggaactgggaactcaaggcacaggagcctggcttttgcgcagggcgctcacaggccggtgggtgcaaaccctgaaggacacacagcctgtccctttagcgcccatcgcttctggtgtgagctcccgctaagggtgggtgagtactggggtgggcttccagaagaggcctcctttgagccgaatctgcagagaccaagtgtctatgagaactgctcaagagtgctttgcacattctcctccacaaaggtcgaggctcccactgcgcccaggaatgcgcctcgtcagacattaggcgccccttgattttgtgtttgcatctcacgcggtcctctagctgacaagtgcatcagaagagtcacagtggctgtcacaagccagagactcgcagaggacaggaacgcgggaaatctaggcaattacctccagcatataccaagagctattgcgaggatcagatccctttaaaaatggtgacgagacaggagagggcggctcctctagagctttccggaacgtctttacctctgtgtcctttataccttttatctcccccaaacaaggtccttagtcagtttctccttctatttccccatcttcctcccccacctccctgtgtagttctagggggaaaaaatgtgttgttttcctttttttctgatgcttctaatattaaatgcgtctattttcccactctccattgtcttgaggtcttcccctacccaccctgcctagttctgtcacgtcccttctttccctgtatcacaacaatgttctccctttctcacctttgtttctcttcatacttgtttctctctctgtgtctctctcattctcttcccttccaaatgtagtatttggagactgtaatatcgattgaggcagacaatagaaaactgtcgaacctccactgtaaattcattcttaatcctatgaaaaaatgcatcctgaaacgtgttgcatgcacagtgagacaaaaacctgtgtctttaggtttcctgcgatctagcttggaggcgggttgggggggtgtggagggaagtgctggagaaattatcccattattgactgagcagcaaagaattttcaagaacagtgattctcctagaaaaagtattgctgctgccatttcaatgcaaaatttggcttttgagtaaaaggcttaggtttttatcttccggggagaaaaaaaaaacccaaaagacaaaaaaaaaaaaaaaaaaggtcatagcgtccctgggtgggctcgaaccaccaacctttcggttaacagccgaacgcgctaaccgattgcgccacagagaccgagtcgactaccggcgtagtagtgagccgagtcaatgggagcgagcctggacggcgcagacgccgtaagagatgccgccatcgggcgaaataagtggaacccgggggagaaagggaaggatcctgatgggggagggaggcgaaagagcttgggaggagaggacgcgggacgtgcacgcccttcctccattggaacggcgagaggtcgactctggctatcctcaggttctacctcaaacgtggagaggcgcggaacgtccctttttagggtgacctgagattgaggatacgtgaagtcgggccgcaggaagtcccccaaatcagaacaagcttcggcttccaaactccctttcacagctgaacccctgcagccgcaaaatacccgcgacgcctacacgcgacgccttccccttcccacctgcatcattaaatttccatttaatgggcgcctcctatatactaggcactgttgtgggccagtgaatattccgagcctaggcaagtgcctggtacacagtaaacgcaggatttctggagtgaataaataagctagcacgactaatacgacgaactcatacatcacgttgataagcgtcacggtgccccttcagctggggccgcagcttcctaaacccagtttcaccagcccacgtgcgcgcaggctccgcccccagtccctgaggtcccgagtccaggtccgccgagatcccactatgcaccgtgtcgcaagtctcttccgcagccacagtgacttttcacttccgcttttcccgcctccgttttgactttgcaaccaaactacctgtactggtgaccgacagggacgtgtgaccaatagaaagcccagatgtccaggaagagtccgcctatcagccaatgaagagacagcagtgagagcggttgcgcagtgaaggctagacccggtttactggaattgctctggcgatcgagggatcctagtacaccgcaatcatggtgagatggggagttaaagcaaaggggcatggggaaggattgagaagcggagggggtcaggagaggcttggggacgaaaagggcctagggtcgatggaaggaagcggtttcagttcgaggggagcgggccccggtgaggaccaagagggtgagtgcggctcattgccgccacacagtgctcatcccagctggagaaccaggggttcagacgcctccggaatggagaacgggcgtacaggagcctccgcatcaggagctgggccgggggctgtggcagcgtttgaccccccgcgctgacccctccgctctgtctgtcctagtctattatgtcctataacggaggggccgtcatggccatgaaggggaagaactgtgtggccatcgctgcagacaggcgcttcgggatccaggcccagatggtgaccacggacttccagaagatctttcccatgggtgaccggctgtacatcggtctggccgggctcgccactgacgtccagacagtgtaagtttcaagggtccccgcccacacccaggcctcttcttggaccatccaaccccggcgtcttgaccggccaaggtgtcagtcatctaccacacaccaccagtgagtttgagactttgccgcctccaaaaaacatgtccttccctttcttttttttttttttagacagggacttgctctgtcacccaggctggagctcagtggcatgatctcagctcactgcaacctccacctcccaggctcaagcgattctcgtgcctcagcctcctaagtagctgggactacaggcgcgcaccaccatgcctggctaatttttgtatttttagtagagacagggtttcaccatgttggccaggctagtttcgaactcctgacctcaagtgatccacctgcctcagcctcccaaagtgctgggattacaggcatgagccaccacacctggcctgactttgattttgacaacaattttgagcagacaagacaagcccaatagaaacatcttgcaagcagttggggttttgttattacatctcagggttggggaagcattggcaatgtgccaaatctatgggagcagattctggagagacaaagtctgtagggagggaaataatgagcggcagtttgagagctgaacgttacatttagcagtgaggggcgaagagaagccagagaagaataagagaggaaaagaacggtgataggttttcaggagggaatacgtggtcacagggggcaggtcctgcagggtactggtgcctgaggagcagcaggtcctggatttgtttcctagaaggtggagagactagctcacaagcgtgggtggatgcctgtcagaaaatgttctcatttcggctgggcgcggtggctcacacctgtaatcccaacactttgggaggctgaggtgggcggatatcttgagatcaggagttccagaccagcctggccaacatggtgaaacgctgtctctactaaaaatacaaaaattagccaggctgggtggtgggcacctgtaatcccagctactcgggaggctgaggctggagaattgcttgaacctgacagacggacgttgcagtgagctgaaattgtgccactgcactctagcctgggcaacagagcgagactctgtctcaaacaaaataaaaaaagaaagaataaaagaaaatgttctcatttctcttaaaactccctgagtctcaagaacataacacttactgagatctcacccagcctgcccttttttcctgtctggtagagtcagagaatgacatcctggggttcctgtcagtgaagtctcccgtgagccttcccttctgcagtcactgctgttctcacaccatttccttttcttcagagggcttttctcactgcgtttgcttccttctgggcaatgactgctcatttcactaggcctcagtttccttacctggaagatgaagctcaagtcatttctaagtctctttgctctggtgtcctgagactcattgcttttcctccagcaggtgtggcattggtctgctctatgcaggggcctatcctggggctctgagatggaactggcaagctgtgaccttttttccttttttcaccagagctgccaaatggcctttttctaaggcatctttcaagtctgttagcacatagcacagcagttggtgctgcccccttttttttttttttgtcacccaggctggtgacataaacttaactcactgcaacctccgcctccaaggctcaagtgatcctcccacctcaccctcccaagtagctgggactacaggtgtgtgccaccatgcccagctaatttttgtagttattgtaagaggcaaggtttcgctatgttgcccacagctgaactcctgagctcaagcaatccttccgcctcagtctcccaaagtgctgggattacaggtgtgacccactgcgcccagcctaaacatttttaatatggaacgcttcacaaatttgcatgtcatccttctgctaatcttccctgtattattccagttttaatatatgtgctgctggccaggcgtagtggctcacgcctgtaatcccagcactttgggaggccaaggtgggcagatcacgaagtcaggagatcgagaccatcctggctaacaccgtgaaaccccatctctactaaaaatacaaaaagttagccgggagtggtggcgggcgcctgtagtcccagctacttgagaggctgaggcaggagaatagcgtgaacccgggtggcggagcttgcagtgagccgagactgactgcgccactgcactccagcctgggcgacgagtgagactccgtctaaaaaaaaaaaaaatatatatatatatatatatatatgtgtgtgtgtgtgtgtgtgtgtgtgtgtgtgtgctgccaaagcaagcaccagttgctacttcctaacacatgtaagactacagttttccctgggcagggactgagatgagatgtctccttatgtttccctgacctcaacagggtagacactcaggaatattcaataatgacttactaactcacttttctcctacctcagtgcccagcgcctcaagttccggctgaacctgtatgagttgaaggaaggtcggcagatcaaaccttataccctcatgagcatggtggccaacctcttgtatgagaaacggtgagtgcaagtgtagctagcactgagggaatgcagacatctttgaatgtagtatggagtaggtactgaggaagaggactctccttgtttttccatctcttatttgcaggataatatccttattttatgggtgtgttttctttgggcctgtctggcaaccagataggaaagaaaatacttatgttggaagaaggcaaggaatgcacatagcagataaatttgcatctaggcaaaagagttagtcccaccagagtgttctggggtctcccagcaggagccactcttgccctagagctattctgtcagcactggcttcttgggaatagcagggagcctaggaatggggtgttcattttcgtcagttctccttgagggctttatggtgagaaacaaggggcctaactgtagaatttagtgcagaaatctaggatggaattgaaaggaaaccctgtgggtgctttctacctctgggcaaacctgggtggccagaatataagttgagctctctttttcttttttttttgagacggagtcttgctctgtcacccaggctggagtgcagtggcgtgatctcggctcactgcaacctccacctcccaggttcaatcgattcttctgcctcagcctgccatgtagctgggaccacaggtccatatcaccacacccggctaatttttgtattttcagtagagacagagtttcaacatgtgggtcaggctggtctcgaactcctgacctcaggtgatccacctaccttggcctcccaaagtcctattataggcatgagccaccatgcctggcctgatctctttttttttcttttcttttaactttttattttgaagtaatttttgtaatttgtaaaaataccctttagctttcaaaaactttttctttttttttttttgagatggtgtcttgctctgtcgccctggtgtgcaatcacggctcactgcaatctccacctcccgggtccaagtgattttcctgcctcagcctcctgagtagctgggattacaggtgtgtgccatcacacctggctaatttttttttttttttttttttttttttagtagagacaaggtttcaccacgctggtcgggctggtcttgaactcctgacctcaactgatctactgcctccgcttctcaaagtgctgggattacaggcatgagccactgcgccctgcaaaaagtcttataaagttgtaacaattaactcatatttggatgtatattaaatggcttgctgggcgtggtggctcatgcctgtaatcccagtactttgggaggccaaggaaggtggatcacttgaggtcaggagttcgagaccagcctggtcaacatggtgaaacctcatctctactaaaaatacaaaaattagctgggtgtggtggtgcacgcctgtaatcccagccactcgggaagctgaagcatgagaattgttgaacttgggaggcagaggttgtagtgagccaagatcatgccactgtactccagccttggtgacagagtgagacttagtctcaaaagaaataaaaaataggtcgggcgtggtggctcatgcctgtaatcccagcactttgggaggccaaggtgggcggatcacgaggtcaggagatcaagaccatcctggtcaacatggtgaaaccccatctctaataaaaatgcaaaaattagctgggcgtggtggcacacaccggtaatcccagctacttgggaagctgaggcaggagaatcgcttgaacctgggtggtggaggttgctgtgagcaacttgcctcagcctcctgagtagctgggattataggcgcctgccactgcacctggctaattttttaatttttagtagagacaaggtttcatcatgttggccaggctggtctcaaactcatgacctcatgatccgcccacctcagcctcccaaagtgctgggattacaagcatgaaccactgcgcccagccaacgaaaaaaaaagttaataatatctgggattatctggataagaaccttaaaaccaaatactataacacagctcagggcctgtgtttgaacttcctattatgctgatgccgagttaccatctgaagtaacttttactgcagtgtttcagacagaggtgcgtagatggtatctctggggtccagattttaaaaagggtctggacattgctcaggtttgcagttcaatgcctcagcctgtcctgccagaaaaatcactgatttcagatgggctcatagaggaagctcccgtcaatagtagctaagaatccagaatttttcaggtcacctaatgtattttttttcttttcaataagagtaagacatttattttattatttttattttttattttattattattatttttttgagagtttcactctttcgcccaggctggagtgcagtggtgcgatcatggctcactgcaacctttgcctcctgggtgcaagcaatcctcctgcctcagcctcccaagtagctgggaccataggtgcatgccaccatgcctggctaatttttaaatttttttgtagagacaggggtctcactttgttgcccaggttggtcttgaatgcctaggctcaagcagtcctccagccttggcctcctccctaagtgctgagattacaaacgtcagccatcatgcctggcctaaaaaagttattttcatggtggctcatgcctgtaatcttgaactgtgcgtgtgtatgtgtgtgtgtttctatttagagctataactgaagatcatgcccttagaaatgactgtgatccaggcctggagcattggctcacgcctgtaatcccagcactttgggaggccgaggtgggtggatcacaaggtcaggagattgagaccatcctggctaacacggtgaaaccccgtctgtactaaaaatacaaaacattagctgggcatggtggcgggcacctgtagtcccagctactcaggaggctgaggcaggagaatggctcgaacccaggaggcagagcttgcagtgagccaagatcgcaccactgcactccagcctgggcgacagagcaagactgtctcaaaaaaagaaagaaagaaagaaatgactgtgatccaataagacatatggataacgtctcttttactgactctttctactgaggatattggccatttgttatttggtattttatagatattccttaccttataaactgttataagtttaaaatattgtaagttgaaatgggtattttgtagacataggatgcaaatacacaaaacactatatccaaaaattgctcacagcagaacagtgtaaagtatctgttgtttcctctggtgattgtgtggctgactgggagctgcggctcattgtcactgcccagcatcaggagtgggtttggtaccacaaattgctagcctgggaaaagatcaaatttcaaagcatagtttccactgaatgcctgttgcttttgcaccatcataaagttgaaaaattttaagttgaaccatcataagtcagggaccatcatctgtacataaagatccctaagactgatttttcttttttttttttcttttcttttctttttttctgagatggagtctcgctctgtcgctcaggctggagtgcagtggcgcgatctcggctcactgcaagctccgcctcccgggttcatgccattctcctgcctcagcctcctgagtagctgggactatagtcacccgccaccatgcccagctaatttttttttgtatatttagtagagagggggtttcaccgtgttagccaggaaggtctcgatctcctgacctggtgatccacccacctcggcctcccaaagtgctgagattacaggtgtgagccaccgcgcctggcccaagactgatttttcttaaagatcagtgtctagaacaagtttctgatgagctgccatttccttttgacaatgagagtaacccagccactgagtatccctctttgccttgcctgctagggggctcaaaacaaaactttgtgttcagtctgagttatcttgtattatgttttaatggtttagttttatttttcagtgtttttcatataaactgcctccaatcttttctctaaaggagtagaggtataaacatacacatagaggactgagtgatggtaggaccttgggtgaggagagggaggattagaagaaaacaattctgaaagaaagaaggagcacaagagggtcagaggtgagaaggatagaaaggtaagtgttgaagaaaagaaagtggaaaagtcttagaatatttctagctggcaggagaagggagagggagctggcctcagggaaaggtgatcttcctaaacaggtcctccatttccctttgggtctgggtctaggccggggccttgtctgaataggcttaaacatgaaagcgagcgttcttgagttctggtttctctctctgatgctggcccccacaggtttggcccttactacactgagccagtcattgccgggttggacccgaagacctttaagcccttcatttgctctctagacctcatcggctgccccatggtgactgatgactttgtggtcagtggcacctgcgccgaacaaatgtacggaatgtgtgagtccctctgggagcccaacatggtacgttggtggcatggagaggggctgggctctgagttacccacccttggtcattaggaaaaaagtgtgtttatgtggcaggtaatggggagaatggtgcaggtgggagagaaagccacagctgctgctccttggaagggtatccagaaattccatctgccaggctggctggctggctccagaggagagcatcttctgttaggagaccacagttagatatttgccacagcagtaagaattccttacattgggtttacagggttctcgcatccattcactgagcaaacatttaactcagtgtagggttagaggcagctcaacaggttgtctgggttggcaacctggatccacccaccaccttagttattgttcttggagaagccagtttccctctctgcctccactaccttgactgtaaaatgaggataaaaaagtctgccttagaagtggtgctgaggaagccgggcgcggtggctcacgcctgtaatcccagcactttgggaggctgaggcaagcagatcacctgaggtttggagctcaggaccagcctgaccaacatggagaaaccccgtctctactaaaaaaaaagttaaattagccgggcatggtggtgcatgcctgtaatcccagctactcgggaggctgaggagaatcgcttgagcctgggaggcggaggttgcggtgaacaaagatcgtgccattgcactccagcctgggcaacaagagctaaactccgtctcaaaaaaaaaaaaaaaaaagtggtgctgaggaaaacaaatgagtatatgtgctgccgaagcgagcacaaaaacaagtgagaagagatgagatagtgcttgacggcgagggtcggctgtcgttattaagtgccagctcttccggccactggggaaagcaggtacagtctgctttcaagggcccactgcagtccagtgaagcaagacacatccaaatacctgttgaactgcagtttgttgggaagaggaggaaagaaagggtctgggggcaaaggtacaggaaggggcaggtatgctcagtgactggagagctgagcctggctggagtgtgggttaaacatggggagaaatgatgctggagactgagatgagacctcaaagggccttgaatgccatgccaaggagtttgaactctgtcctctgccataggaacctagggaatcaggtgcctttaggtggacgtgacaggctgttaccgcctgcaggaggcgctgaggtcctgagcaaagacagtggcagtggggaggcaggaaggcagctgtcaaggggacttagtcacttaaaacagaagcgaaggatgtagagacagaggatggctgggttctccagctaggctagccaagacagaatgtagaaggaacaggtttgggggaagtgggtttgtggttggacaggttgggttttgaggtacctgttaagatatccaggatcagagcccatcagacagctgctaaagcacactggagctaaatagggattcttctccctattttacagagaaactgaggctcagtgaagagagacatactatttgcccaatgtcacactgctgattagtaaaagaaattcagggcttgaagtctctttcactttcctttacataattctgcttccttccaaggaaggagctgagaggggcttcccacatcctgggaatcatcccttacttcaggcatgtcttggggccagagctgggaatcttgagcctagaaaaaagagagttaagggaccagaccaaatcagagccagaggctgtggtttgaaggggttccactctgttggcaggatccggatcacctgtttgaaaccatctcccaagccatgctgaatgctgtggaccgggatgcagtgtcaggcatgggagtcattgtccacatcatgtgagtatgggctgggagaagtctagaagctctgcagacaccctgcctctctcccttctccacgagcatacaccccattttcccagccccctggtcaggtgtgagataagaaaggtgcttttggcagtcctgggtgagcaaaagtccatgcctccctatggctggtaactggcagcctacccagcttcctctggcctcttgtcaggtgaggttctgtgaccccgtgctcacaagagacatttcttccttaacaatgtctccgaagtctcagggatccgtgttggggtgagccacaacaaagctactgcagatggattgaaattctaggtggctcgcatcctctctccagcccagatctgtgtgatgttctgagctctagagaccaatttccaagcctcagccaactccctaagtgccatcctccttgtccttttacttgtttggggccatcaccaggaacctgattggatagagtaggaggtatccttccaaccactttcctacattgcaggataagcatttggacccttttgggggatagcctgcttaattaccgtgaaatagtatttggccaggcgcgttggctcacgcctgtaatcccagcactttgggaggctgaggtgggcagatcacttgaggtcaggagtctgagaccagcctaacatggcgaaaccccgtttctactaaagatacataaaattagccagacgtggtgtcacgtgcctgtaatcccagctactagggaggctgaggaaggagaattgcttgaacctgggaggcagaggttgcagttagtcaagatcacgccattgcactccagcctgggcaacacagtgagactctgtctcaaaaaaaacaaaaacaaaaacaaaaaacccaaaaaacagaatttaccaccgacggtttttttttatgttctttggggtgaaacacaccacaccttctccttcctaagtggcttgttctctaggcttggaggagcttcttcccccttttttttttttttttttttttgagatggagtctcattctgtcgcccaggctggagtgcaatggcactatctcagctcactgcaaacctctgcctcctgggttcaagtgattctcctgcctcagcctcctgagtagctgggattacaggcacgtgccaccatgcccagctaatttttgtatttttagtagagacggggtttcaccatgttggtcaggctggtcttgaactcctgacctcgtgatccgcctgcctcaggcctcccaaagtgctgggattgcaagcatgagccaccgcgcccggccaagctccttcccttcttttgagagctgtgaagtctggccctgaatcattttctgggaaagcctccctgaggtggttccacctgtggaaagtcggcccaggtctctgttcctatccctccttcctcaccacaggcggaggagatgagctagcaggaatgaactagagcaggatagttacacctagaggcagcgggcagctatttgttctgctcccttgccgcagggcttgagggcttggtgctgagggccaggagagctagtcacagtcacggtccagatgggtagagatgttttcttgtgattttctccctctgcagcgagaaggacaaaatcaccaccaggacactgaaggcccgaatggactaaccctgttcccagagcccacttttttttctttttttgaaataaaatagcctgtctttcactcctgcttttgtctttgatgctttcctgcagatctctgccctagctgggcagctacagccagccactcaagtgtgtgtggcctggccctcggcttgctttctggctcgtgctctactccatcagtgcgtgccagtggggacaatccacatgtcacttgctgcatgctccctgtgtgctaggccccacacaagtgctttacacgatctagaatttattcatcataatgactcaaggtagttgagattatccttgtttggagaagaaggacagttaaataacttacccaagtctactttaataagtgataaagccaggacataaactcatgttccattgatgccagagcttagaatccttttcactcaaactctacgggaaaacccttacatcttttattgcttcaggtagaaatttggtcaagtacccataagtagtctagattagtgtttcttaacctggccagctcattagtcacctgtggaattcctaaaacacataccttgatcccaccccttgagattccaattggccttttaggggcctgggtacctgtcttttccagaattccccaagtgattccagcttgcaatctgcagtacatagatggcctaataagcaagtagaaagtttgcatagcagagtggttcccaaacgttagcccccatcacaatcacctggagggctcattaaaagtttgattcagtagatctgggttggaacctgagaatttacatttctgactcccaggtgctaatgacactgctggtccaagaccacactttgagaactactgggttttaagctaaatgcccagatgcagtagatgaggtgcacagaggtgacatgttcaaagttatgtcaggtgagtggctcctagccagagttcgttctacacagctggaggcgggggggcggggggggggttgtccattcttccatgtgcatggtagtaacagctaacaggcagattggctctggtgctgtggtgttttgtttgttttttccttaagagtctcattgttgctagggctggagtgctgtggtgcaatcatggctaactgcagcctcaacctcccaagctcaagtgatcctcctgcctcagcctcctgagtagctgggactacagacatgtgccatcacatccagctaattcttgttttgtagagacggggtctcactatgttacccagaccggtactgaacttctgggctcaagtgatcctcctgccttggcctccccaagtactgggcgtgagccaccaaacccagccagtggtgctgtgcttttaaccactgtttattaattgcatctgaaagcgggatgtcattgaccatattctttctccaaactcaagccatacattgatttagccgaagctgcctctaaagctaggaccaaaactttttaattctgggaagaaaaaaaaaaggttcatttcccaaggactcacacataacagatgtacacaaagctttttgagttttatttttttcctcaggttggagattcatcgtaacatgcatgcattttcaaacagtaacagggtctcaaactttttaaagcagacgttagacaagcacaggggattgaaaattcccatttaaaaaatggaaactgcagtgggatatggagaagtcacacacttggtggggtggtggtttgtcctgcttccccaaaaggtggatatgaacttaattcacattttttaatttcaatgatctgacctgatgctgggatgtgccgagcagtactgccccctcccccaagggtgttggctcccaccgcctctcacagtggctctgcgcaagggcaagaggctcctgtggaaacttctgccctgggatactggcacaagctgccaagggacagctgagtctccttttccccatggggcactcttcataagtggcacattctagaggagggagagggccacggtcactgacccctgcagatggctggtagattggggaacagttgtctgaatgggttttccctttcaggacctcctgcccgcatgactgccaggaagagatgaggctcctagacttggggggccacaggtttaaggccagagctctgagtgttgtttaaacgcactgtcccttctagcccccaacacctgagtaactcacatgctggggtgctgcagttttctctcccaccctgaattggtaaaaagacaactggggggtaggactggctactgcaaaaagtcctgggtctttggtccacctccccaaggtatgccctggcagaccatgaagacaggaaaggcagggcaggagtgtagcctcacgccctgagcgctaccagcaggcctgtttgaggccaaaagcacaggcaagagaaagagtcaagtagggagaggggataaagagctgcctgtggtgggaacttaagagactgccactgagaacagccacaggggccactcgtggcgcctgccacagaccagcaacccctgagctaaagaaggagaggtggagcactgcttcagtctgcgcccctcagctgtggcttcccggcatgccctgtgaccccaagccgcagggtacaggaaagaagtttgtgctgggggactcaaagacccagaggttaattaacaggaaccagggccaggggccttcatctagaggtcagtggagtctccagggcactcatcactgtggctgggagactacagtgtctcggctgcggacttgtggaagaagagggggaaggatgggagaaggggtgactggatgccagccaggaatcctggccttagccctatcctggcctcgcctaatcagccatgtcgttattcttacacctttcttcttgggagacccaacattattctgagatgccatgagactgtttagcttttcttcatggccccagggagtgaggctgagggcagtcacttcccctccaatgccctcgactgcccagtaaaagaatggcgggacccaaggaggaaagagtgggggcagacaacgcttgggggatcagtccactttctctacattcaaactgcagaccaaatagaataccatgacaaaaagaagagaaaggaaacttgtataaaccaagataaatagcttttaaacatttgaatgccaaaaattgggggccaaactcaaggttttgaagatagcacagcgaatgacctttaaaaaaaaaaattgaaaatccaccaaaccacagctcaaaatgttatgacccagtcaacaatactgtcagaaaaacaaaaagcatttgaaacagaatgctacctctcaaaatgtaaacaatatacaaaacacacaaacatacacacacacacacaaactcaatgttaaacaagttagatacctggtagtcgtctttaaccagtaagaatgtgttacactttccatacacattatggcaacatgatcagcagaccaaatgcagagaagccggtaggaacccgaggccacggaggctgctggaagacagctttccaagcttcagagatgctgcgcctgacgaggagcagatccaaacttccattcttcattatgacgtggggaaatcaagtccaaacattattcctacataatccctttcccaagtcaaatttgttttctccatgagccagttggtttcaagttccctaagtcatgtagtggtcttgcggcagttgttcagacctacctatggccccttcctggggccaaggcagtggtttgacccccatctgcctcttccagaaggtttcccatccaatccagcagccccagtgaagtccaagaatgccgtctccattctttcctgacctatatgctgtgagtcaggcacagagacagtgctggttcctgcttcggaagctgggcttggccaggtttggagggagccacaggaaaccaatctattcattcaaaatggtttcacaagcgatcttcacatctttggggttatctacaagtctgaccatatctcatcccaaatccccagttcctggttgagggggtgagaagatgcaggaatgtacctcccccaatgcagaacaacagagctgtttctctcctggccagagcagcctgtggctcagttctgagggcctgggtggcaggctccgaaggcaggtggaacacctgcaggaagccactccttccaaaaaagcctgtgggctgcagatctgctaaaagtctagagcggggcaacaaggaaaaacagccccaaggctgaggccaggtcaaaacccacatcaagcctccaaactggatttcctggatcacatcctcatgtaactaggaagccacctcacgtttggacaccacactctaagatgggggcaccttgctggctgtaactctccaggcacagggagacagatctcctacaaggtcatcccggagcttaacgaggtgtctctgctaaaaagcactccaggcgcttggagatctgcccagagctaagagttcggctagaagtaagagtgcctgggaggaggtcagaaggaagaaggaaatagatcgagggcacagggcctcatttgatacatcagtttctgaagttttcccaaagggaaataaccatttaaacatgagggtcctgataaatccaaaggtactctagttcctcttgacctagtgggaggcaggctttacagagaggacttctgaactccaggggctaagacagcctggggcttgggtgatcatcacagggttctctgagaaccaggtgtccaagagcccagccgctttcctgcccctcaccatcccatgaggatgaacttattcccctctgagatctctgattctgatctgagatctctggtgttgacctggtgtattccagacaggatggaggaataatgcaacagttttcacttgaatccaagggaaaggtggaggaagttgtgcacaatactccataaattacaaagttaatccagacaagagcaaatgcagcagggcgaggtgtctgacctctccaatctggcatccatagcacttggttctggaaggacccttgtgctgggtctaccgggtatctctttaattgaagggaactgagagctcagcaaagatggggagggtgggtaggctgatgaaatatgattataaatagcaaacctggagcaatgaaatttcagaaacaaaacccaaataaacccacgaagtcatctctagccccaaggtatcttaaaaggttacaaggtaccaaaaagggaacccctttttaacctgggtgtcaaatggggagaaaaaatcaagggtaagcagaaggtggggttacatcctgtgagcaggtgcacacacagcacatccccctcctcttcagctaaagtctctttcggtgtcacaggctgcagtctcattgctaaagccctcccaaacccgactctgctcccaccctcccatctagcccaaatacacccttctccctaactcccgatccccgaccccatatccagctctctggctctggctgaaggtagaagagaactacgtcaggatgttggacataaactcgttgaagcgtttggagtactgctcagggttcacagtcgagatctcggcccctgcctgtaatacacaagaggctgattcaggttgagttcctgtgccccaatcaggaggctgcacatggggggagccagggtattcagaagcctcttactcagtatcagagctgaataccacccccaaccccaccaagactgagcagaccacctcaggaagtggcatacaagtcctgaactgtcctggccccactcctgtgatttataaccccaggcctgcaccgaagtagaagaaaggcagtggggaggtggcaacgcggctctggatctctgtgggggccactacatggagaacagggcttcaggcccacagggaaacaggcctgtggggagcagtatgggcatggaaacaaagctattactcgcccttcaacaagatgcacaacaggcccagcaggccctggggaaagacactggcaggcttggccccgagggctggagaactgggggataaacaaattgggcccagcctggcagggagcaggtgggtgaaggcagggaacatggcaaggcaggcaggctgctcttccagtctgctctcctgggaagaaggagacaggagtgtgttccttggagcaggaggcctgagactgccctccctggggtctgagggtaagcacagatgcaccgacccagctgggccctggatgaagatggagaggactcaccccgtgtttcaccgttttggcagcatgtgcagctttcttctttgtatcgtatggcgtgaggatatcaatgatggccatgaaatacacctccttcttgggggaacctggagggacaaggagagcagggaagaaggaagagggggcaggagaagggcagacagcagctgggcactgctacaacccccagacacaaggctcagctccatccttatcatgttggggctgagaaaaggaccagtggagtcctttccagctgtcatagctcttatcttattggatcttcacagtcactctgtggggctgacaggacagtatgaataaagtttggttcatctcatgaaccagagcagaaccactcttcagtcagccaggacaagcagggaagtataggaaagcctggcagaggaggagccccaggttcaggtggtgaccctggatgggaatctggaggcagaaagaggtcaaaggcagcaatgaatgaggtggaggtccagatgcccctagaaggatctaaacaatgagctgagggggtaggatgagggcagggctgtgcagagcaggcgcaggctctgacttactttcatggcttttcatggcatagacgtcaacagaggggtcgaattccccaggaccaaagaaccgaggaaagctgaggaggttgccagggctgtccggaggtgtgccataggagcagagtaggttgccacccaccccatcattctcacactcctcgtcctctgcccgctcctccacctccatctcctcctgctctgcccggtccacgtcgtggatgcccaccagcaggctgtagtccatgatcttcagctgtgccaagaactaggaagggcaaggatggaaagatggaaggaagaagaggttacacaggacatcccagtgacatccagaaaggggggaaaggcattcctttcaactcaattctacaaacagttttgaaattcaacagagagtaaggcatcagagcacccgccctcgcgagctctctctaatggggaagacagtcattcagcaggggaaaggcaggaggtcgaggctgcagtgagctgtgatcacaccactgcactctagctgggtaacagagggagatggtctcaaaaaaaaaaaaaaaaaaaaaaaaagcaaggagctgtgggagtttacagtgaggggtgagcaagaccctccctgaagaaaggagttgaggccaaggatgaagaggagtcagtgaggcaagtactgcaggttaaagatagaacgagcactgcaggaagagggaacagcccatgacggtttgggatcaagagaggccatggtggctgggcacggtggctcatgcctgtaatcccagaactttgggaggccaattaaggaggatcacttgaggccaggagtttgagaccagcctcagcaacgtgatgagaccccatctctacaaaaaaatttaaaaattggctgggcgtggcagtgcacacctgtagtcctacctacttgggaggctcaagtgggaggatcgcgtgagcccaggaatttgaggctgcagtaagctatgacggcactattgcactcaagcctggggaacagagtgagaccctgtctcttgttttaaaaaaagaggccatggccaagtttgaggaaagaaataatgaaatgatatactatggaagaggatggagcgatggatatgacacaacaatatatttcagatcaaaatttcaacccattatgagtcctaaacccaatgtagtgggctggaactaggatttctttaaattaaatgcagtagtccacccttatccacaatggtttcagttacctgtggtcaactacagtccaaaaatattaaatggaaaattccagaaataattcataagtttttaaatagtgtaccattccgagtagcatgataaaatcttgctatgtcccattcagtgctgcccaggatgcagattatccctttgtgcagtatatccacactgtatgcactaacgtcccattagtctttcagtagctgtccgtagctgtcttggttatcagttcactatagttgtatcacagtgcttgtattcaagtaacccatatttgacttcattatgactccacagagcaagagtagtgatgttggcaattcagatatgccaaagagaagccataaagtgctttctttttttgagacagagtcttgctctgtcaccaggctagagtgcactggtgcaatctcggctcactgcaacctccacctcccaggttcaagtgattctcctgtctcagcctcccaagtagctgggacttcaggcatgcaccaccacactcagctaatttttgtatttttagtagagacagtttcatcatgttggccaggctggtctcgagctcctgacctcaagtgatccacctgcctcagcctcccaaaagtgctgggattacaggtgtgagccactgcacctggccagctttaagtgaaaaggtgaaagctcttgacttacaaagaaaataaattgcatgctgaggttgctaagatctcctgtaagaacaaatcttctatccgtgaaattgtgaagaaggaaaaaaaattcacgcatagtatatacagggttcagtactatctgtggcttcaggcgtccactggggatcttggaacatgtcccctgctgataaggggggactactgtataataaaatagaatagaaaatatcagaatacatgacagaaaataagggtagacagtgtttcagttgtgtgtatccattgggttgcaaggtaaaatatacttctaactggcctcagagacaaagtctgaaaaaactatgtcatcgacttttcagcccaggtaaaaatagaaaaaaaaggaaaagggaacacaaaaccatacaagaatggcagccagaaccaaccaatattctcaacccattccctgaaggtcaaaagaggctgtgtggtgctgggggaaagtcctcccctagcatcatgtgactccccttgccaagccttagttttctcatctgtataatgggtgctgtgagcagggtggtggttcaagtcttttatctaggatttcaagacaaagtatggaatgatacaggatggaaatggccagctagcattccagtttagctaataatgaggcaagagtgcagtcaccatcatacagtggtcactaggagactgttagactgaccaccatgttaggtcctaacagagaactaggaggagaatcatcatggaagcagagcagctctatgcacgagcccagaacacaactaaggacaaggagccctaaagatgggagcccagcaggatctccttggaagaggaagggagggagggatgccactctgagcacttccagacaaagccttctcaaggcccagggagaaggggctagggtcccaggaaaaagaaggtccatgcaccatgccctccacccacctgagaacatttataaagcaacatgcattgaaaacaaatgcactgagtaaactgcattaaattcttctcagaaccacagtagggggagagggtagaaaagggagaaggacaaagactcaggacaaataatgtcagatgatgaaaggcagaataaggaaagaacatagttgggggtgactaaggaaacgcttcctagcaaaacgaagtttatgacacccatgttcacagtagcattattcccaacagctacaaggtggaagcaacctaagtgtgatggctaattgtatatgccagctggactgggcctgagtgcccagacacttggtcaagcattattctgggtgtgtctgtgagggtttctgggtgaaatgagcattgaactggtggactgagtaaagcagatggccctccccagtgtggatgggcatcatccaatcagcagaaggcctgaagagaagaaaaagggtgaccctccggtgaggaagagggaactccttctgcctggtggcctgatggcctgtagaataaaaccacaccaccagctctcctgggcctccggcttgctgactgcagatctcgttggtatccataatcccatgaaacaattccttaaaataaatctcttagggccgggcgtggtggctcacacctgtaatcccagcactttgggaggccgaggcaggcagatcatgaggtcaggagatcaagaccatcctggctaacatggtgaaaccccatctctactaaaaatacaaaaaaaactagctgggcatggtggtgggcgcctgtagtcccagctactcgggaggctgaggcaggagaatggcgtgaacccgggaggcggagcttgcagtgagccaagatcgcgccactgtactccagcctgggtgacagagcaagactctgtctcaaaaaaaataaataaataaaataaaaaataaatatcttggtataaagagatttacaaaacatcctataggttttgtttctctggagaaccccaactgatataacaagtgtccattaactgatgaataaacaaaatgtaatacatccatacaatggaatattaatcagtttttgtgtgtgtgtgtgtgtgtgtgtttttgagatgaggtctcgttctgtcgcccaggctggagtgcagtggcacgatctcggctccctgcaagctccgtctcccgggttcatgccattctcctgcctcagcctcccgagtagctgggactacaggcgcccaccaccacacctggctaattttgtttttgcatttttagtagagacggggtttcaccgtgttagccaggatggtctcgatctcctgacctcgtgatccgcctgccttggcctcccaaagtgctgggattacaagcgtgagccaccgcgcctagcttttgttttgttttttaaagagatggggtcttaccctctagttcaggctgatgcacagtggcatgatcatagctcaccacaaccgtgaactcctaggcacaagggatcctcccacccagcctcctgaatagctaggactacaggcacatgtcaccacacccagctagtttttaattttttgtagagacaggatctcagtaaattgcccaggtctccaacttctggcctcaagcagtccttctgcctcagcctcctgagctgctgggattacaggtgttagccaccatgctcagccttattcagctttaaaaagaaagaaattctggccaggtgtggtggctcacgcctgtaatcccagcactctgggaggccgaggcaggcagatcacgaggtcaggagatcgaaaccatcctggtcaacatggtgaaaccccgtctccactaaaaaaatacaaaaattagctgggcgtggcagcacgcgcctgtagtcccagctacttgggaggctgaagcaggagaatcgcttgaacccgggaggcggaggttgcagtgagccgagatcgcaccactgcactccagcctggcaacagagcgagactctgtctcaaaacaaataaataaataataaaaagaaaaaaattctgacacatgatacagtatggatgaaccctgaagacattatgctaagcaaaataacagagtcacaaaaggacaactgctgtttgcttcctttttttttttttattttttgagatggagtttcattcataacatgttgcccaagctggagggtcaccgcaacctccgcctcctgggttcaagcgattctcttgcctcagcctcccaagtagctgggattacaggcgtgcaccaccatgcccggctaattttgtattttcagtagagactgggtttctccatgttggtcaggctggtctcaaactcctgacctcagaagatccgcccacctcagcctcccaaagtgctgggattacaggcatgagccacctcgcttggctgtttgcttcctcttatgtgaagttcctagagtagtcaacttcataggggcagaaaattgaacactgattgccaggggttagggagggggaattgggaattagtatttaatgggtatagagtttcagctgggaaagataaaagttcagagatgaatggtagtgctggttgcataacaatgtgaatatacttaatgccactcaactatatatcaaaatggttaaggtgcgtgcctatagtcccagctacttgggaggctgaggtaggagaatcacttgaacccaggaggcggaggttgcagtgagccgagatcgtgccactgcactgcactccagcctggggacagaacgagaatctcctaaaaaaaaacaaaacaaacaaacaaacaaaaaaaacacctattattatatgtattttaccacaattaaaaaaaattttttttcccaagtttgtttgtaggatttggttttaacgagcagcctctcaatttattaaaagagaaggagacgctgagttatcaagtggtccagataacattttcactatttagcacctgtcctccccagattacaaacagaagtttgctaggtaagtggagaatcagagccagagccagagaagaacctgattagtggatttttgttttttgagacagggtcttgctctgtcacccaggctggagcacagtggcatgatcacagctcatgttgccttgatctgccaggctccagtgatcctcctgcctcacccttccaaggtgctgggattacaagagtaagccaccatgcttagccaactttttcggtttttgttttgagacaatgtcttgctctgttgcccaggctggagtgtagtggtgagaccacagctcactgcagcctcatctcccgggctcaaacaatcctttcgcctcagcctcccaagtagctgggactacaggtgtgtgcccctacgcctggctaaattttttaatttttagtagagatgaggtcttgctatgttgcctaggctggtattgaactgctgagctcaagcgatcctcccacctcagcctcccaaaatgttggggttacaggaccttaatagctgggttcctacagctctgatggccagatgccctctccattgtagggacaacagcagaagggagtttgaaaaaggtgttggaatgaattagtgaaaagggaaaagcattctaaactaaattacaaaggtcctactggcgccaactatgctccgtcaggtggaatgatcatttgcacttgctttaggtgcccataagtgcccacgctgctcaaatcaccacccttttgtccatactcctggaaagtactgaattccattcttcttaaggtttaagaggcgcctactctaggtacagaaggagccttgcaggtgaaaatgaaggttagtaagtacctcaacgtcccgcttcagtttctccaggaagttctttttactctcctctcccacatgcagcttctgcccttcattgaggaagtcattgtctttgaatgttggcaagtccttggcctaggagagcaacagcagttaggctgggtaagcctgattaattcaccccagggacacccaactgttctgccgggagcaactatacagaaaggggaaggaggggttgtcagtgtaccgaccctcaacctgctaaatcagcagtgcaggagcctctagtcccaggctttgggtgggcagggagggcaaacacatgaaagatgaggaatgactaaaggattctttcctgttgagcctggaccagctcagggctcaggcagccactgactgactcaggctggactatgagatagaaatgtctgccatcccagcaggactatgaagaacgtagtgagggcagaggtaaaagaccagagaccaaggtctaggcctagcacaaggacagacaggtgattcatgacacacggcatttcatgttgacagacggcatgtctgggagctgggctaggggctggggtgggcgagggacaggatggccgacaggagttgtttctgactccaagcgacccttccattcctgctcagcaccagcataccttctccttgtcgctcgcttctctggcaaccgtagaaccctgaaaggataagagccatcaggggaagtcaagctgaggcaaagtcgactgcatgagcaaacatgggagagccagcaggtgaactcaagtaggcttgttagagtcctagaggggccaggaggcagcaccttgttcatttactgtgtcaagcccacttatagagctctatgtgcaagacactttttaggtgctcagcaaacaggactgcactggagaagctcagtccctgcccttgagctactttccttctaacaggggagacagatattcagcagtggttccacaagtcattagttcattcactaccacggtgctcagtggtacagggaggagcaggacactctgaaagcacataccacacgggcccggcctggggagggacagtggccagggcctacctacttcctggaagtagtatttgggctgagctcagaagggtaaggaggaagcaattaggtgggggaaggagtgggtggagagagagaaggagactattccagacagcagatgtgaaatcctgggaagaggagcacaggcactgcaggaacacagaggaaaccagcccagttgcagcacagagggaagggatggcggcataaggtgacagaagtcagaagccaggttcaagaacacggagcaccctagttcacagccacaagtgtgtccttctcagagtctagagatgcacttgtgctggcagtccatgggggcctgatggatgctaaagtgcatgcgtcagcacggcctccctcactgtgcacattccacagacaggaacatcaactgctgcataaatatggcacatttagggcttaaataatctcctgttactgtcacctggacttcaaactgcctttggtccacaagaatcaggcatatccactccagagttccctgtccatgccaacacataggctccagcttcccaattacatggaagttggagtagtggccccttcggggctcagatagaggggaggcacagctccggcaaacacagagccctttaccttgaggtcatacttgcgatgcacagtgagccgatggctgaacacgttcctggtaaccaccatgtaggtttccacaccatccacggtcaggcggtacatgcccaggaactgtggcaaaagcgtgttgccatgacactccactataaactagaatggaaaggaagaagagagaggactaaggaacaggcagtgccagggatggatggggctcaccccagactaaaatgctccctggctccctgggattctaacctctagaccagtagttctccagctgggttctatgaagtaataggggtttctcaggcttaaaatgggcaacagccacctccagcctcctgttggcatggcagagggagaggcaagctgagcaggtggctcagagcccctgtgggttcatattattagtatctcacctaagattttgtttaaagtaggattctaccacaggaaaatccctgatccacaccttgcatctcttctgccagcctgatatgggaatgccgcagggaagagacaggatgcagaggcaggccagggatccagccatctgggagaagagaacagctccatatccaaagctcttatccatgccatgccccagggtttctgccataactcctgaaagaccagaagctcccttcggcccttctcaggtgccccagaaatgaagacccaagtaggctgaggacagacacacagatggtgccacggggctccctgccttcctcatggacaggttccagatgagtggagagatgggacgggaaaagaaacaagcctgccgagctgagggggcctctttcagaagaaacggggcggatgccagtgcgtgaacactttccaactgggagtcagtcagcgatgagccttcatggctccttttttcttttttaaagtaggcatttcagctcacagaaatacggttgcaggagagtcccactgcttggtgatcagaagcagctgccattaccagagaggaccaacccctccctaagaagctcccccagggctctcttctccctcttccaacccatcctctgcagcccaggcttgggactcaccatacctggtggtatttctttaagatgttgtgcatctccgccacgtcctcgctggacacagtcttgatgacaaagcgccggtcgtaggtggtgaggaaacgcgtgccacaccgaccctggctgtcactgttgatgggggcgctgcgcgtcactgaattctgataatcgagacaaaagaaggctgggcttggcaggggaacagaattctgactttcgctgagtcttccctcaggggctggactgcttgaaagccaacaacactgagatagagggactcccagatgggagtttaccctccccttttctcacagggtgttcacatccctccctaagtcttcctccaaagtgacaagaattgttccttaccacctgctcttcatcccagtctaggatgggaagaggactgactgtgaaagtttccatcctgatcccagatagctatcctaccaactaaaattctgcctctgatggagggggctgagtctaatctggactctcacacgcactatgaccttgggtgagccatttaacttctctacccctgcatttcctcatcaggaacacaaagatgcagactgagctgattctcccagtctcttgggggtagcaaagatgaagcttagaaaatactgtcttcaaggggtctagcacaaagaagcaatgcccattcgtctcttgtccctggatctaccctaatgctgaaaaaccttccccaaagcaggaagctgatcctcatctctgagcctgacacctttccccttgcctcaacctcctgcttgtctatgcaaggctgggaggcagttttggggagctttcctggctgtatccctgctcctcctcaaggtcctactcccattaggatcagagagcagtagaagccttaagagggagggtgtgggaaggcgtgagtcaaccaaagggatatgttcaccaagcagatgccaagggacctctgggaagcaacggtgaggggagatcccaagtgtccctgttcccaagaaaacatacatggggatcatgtcacagaaatgtctcctctccaagatgtttccccatctcttaatgaggatcctgttattatttttgtagagacagggtctcactctgtcacccaagctggagtacagtggtgagatctcagctcactgcagcctctacctcctgggctcaagtgatcctcccgcctcagcctaccaagtagctgggactacaggtgtgcaccaacatgcccggcttatttttgtagcttttgtagagatgtagtttcgccatgtttcccaggctggtctagaactcctgagatcaagcaatcctcctgcctcagcctcccaaagtgctaggattacaggtgtgagctactgtgcccagcctttttttttttttttaaagatggtgttttgctgtcacccaaactggagtatagtggtgcgatcatagctcactgcagccttgaactcctgggctcaagggatcctctcgcctcggcctcctgagcagctgggactataggcatgcaccaccatgcccggctgatcaggatcctactctttactttcccctaatacctcctcagaaaaccctggtggagaagtgaggaccaccttcatggggaaaactaaagtcagaggtggtaagcagctctgggagttcctcagcaaaggtgctaaagtagcaccccaaaaaacaggctgttcccgttacagaaaggttgagtagactctgtgactgagcgcctcttcctcccagcctggcctctctaccataagacttacaggctgcaagcctagttgggaggtagaggcagcatcccctgactctctaagtggctggtagtccaagaatatagggtcccctccctgagcaccatcctccctgccctcatttcagtcttgagcacgggcatgcgcccacaaggctactaggggcaaaatgcagacactgagaggatgtggttagacagcccaggggagggaaaggaacccctcacttgcaacccctcaccaaggaacaatggagggaatctgtctgagcaacttggggttgcaatagtggcaagaagtttccagaaaacctccagccccagtcaagtcatgattgagttcagggttcaatcctaacagcaggctggaggaacctcccagtacctcttaggtgtaggcactcctgggcattcaagcccaaggcatctcctcctcctctcacaaaccctcaccctcttcttcgagatacttttctttgcatgcaagccctccagagaggaggagagaggggaggagactctaacccaaggccccttctgctgctgtgaactactctatcaaaggggtggggtgggaggaactacagtgttagaaaagatttgggcatccattctaggtttcactgtgctatacactaggtttcactgtgctatggggaaaagttttctccacagatgaatgaaagtcagctatatttcaggccaggtgcggtggctcacgcctgtaatcccagcactttgggaggccgaggcaggcagatcacaaggtcaggagatcgaaaccatcctggtcaacatggtgaaaccccgtctctactaaaaaaaaagaaatgcaaaaaattagccgggtgtggtggtgggcgcctgtaatcccagctactcgggaggctgaggcaggagaatcacttgaacctgggaggcagaggttgcagtgagccgagatcgcgccattgcactccagcctggatgacaggagtgaaactccatctcaaaaaaaaaaaaaaaaaaaaaaagtcagctatatttcttacagctgtaaaggtgaagtggaaaattcgcccaccttcaccacaaggctgtctgccaaggaagaagatccaaggagatgtgctaagaggagaagtgacagaaaccatggactgagtcagattctaatgtccctgacactgggattgattcctcccaacaggccaatggcctctacaacactgtcacgccctgaagggggcagttgccctggcagaccaactccccactcccaccaccaggatagggcacaagtttaggaggtgacactcatacctggcaagaggttacactacccttgaagtcttccttttctaatctatttcatctgctttaagaggcctcatctctcgctaacaacaattctctctctcttttttttttttgagactgagtttcactcttgtcgcccaggctggagtgcaatggcgtgatctcagctcgctgcaacctccgcctcccaggttcaagcgattctcctgcctcagcctccagagtaggtgggactataggcgcacatcaccatgcccatctaattttgtattttttagtagagacagggtttcaccatgttggccaggctggtctcaaactcctgacctcaggtgacctacctgccttggcctcccaaagtgctgggattacaggcataagccaccatgccccacccagttctctttgaagtcaaactacgaatgagaagggttcttcagcctagactgggaatgtcagactaaaataaaggtgcttccgcagacccctctccctcctgctgccctccctctgagggagaggaacctgagtgtgtgcagcatcctcagaagcatttctaaggccctcgccctgcaaggggcccccagtgctgggggagagaccgcctgggctggagcaaggcatgacagggagacacagcacaaaaacagccaacacgttttgattctctacctgtcctgtggcttcctgaccccattccattccctaatccactgatgttgccaggagcctccatacctggtaatcctgatcatcaattccaaacctctcccgaaggtttcggaacaccatggggcaatactccttaaacttaaagcggctgggcaggttctccctagggaaaagcagagatatgtctttgtgaactgccccttgctcatcttaattctattattattattattttttgtaatagagacagagtcttgctatgttgcccagactggtcttgaactcctggcttcaagcgatcctcccacctcagcctcccaaagtgctgggattacgggcatgagccaccacacccagcctcatctatattctgacttcagaactcttcaaagtgtggtccacagattgcctggatctgaacatctgccatacttaacatgtaggtttctaggctcttaggaattctggagttgagtcgaaaaacaaacactccaggtgattctgagcatgtaaaagtttaaaaactttacatcttgtattcactttgtaaaagtaatccagcagtataactggtatttgtgcgattttctatgtgtgtgctgcccttcaataaaacatacattaaagaaaaaaactctcacccgctgggccataagcctgagtgcaggctccacctcacaagcactgtgcttactacagtgggaacctgcatgtgaacatctgctgtgaggtgaaatcagcctgaatgctacaaggaaaaacctctctcatcagagggcccctctcctctggccatattcctgtggaagcatcctgaagatggtcacttacaggaagccctgccctgggcttccactgggacgtaggaaaagagtgcctgagttaaagaggtcttcagtcaactgagtgggaccacagagccctgtctgctggctgctggcaccaatctccaccctcccactccctcatcaatacagactcccaggaggaaagagaatcaccttgaaatgatgactcttaccaatcctccatctttacaacagctatcctgtttagggaccccctttcagaaatatgtcccagtgactactccaggatgacaggctttaaggaaatcaaaaggaatgtcttcttggaaaggaagtggcctatctgccttatctaccccgtcttctagtaaacagtgctagaatctaataaatagcacatacagggctgggcaaggtggctcctgcctgtaatcccagtactttgggaggccgaggcaggtggatcaccctgactgaggtcaggagttcgagaccagcctggccaacatggtgaaaccccatctctactaaaaatacaaaaaaattagccgggcgtggtggtgggtgcctgtaatcccagctactcaggagcctgaggcagcagaatcacttgaacccgggaggcagaggttgcagtgagccaagatcgtgccactgcactacagcctgggcaacaagagtgaaactgtctcaaaacaacaccaataacaacaacaaaaacacatacacagttgttggaaggacaaaaggaataaagatagaagaaaataagagattgggttctctgctttaggccaagatatcaaggaggtagcacctcaccagaggccatggaccctgaagggggtagtggtgcaatgcccacttcgagaacccggacctctgagtcagaacaaccttctttcttctgggtcagaacaaccttctttctggtctctgagttgagggctgcctctccctccttaggtggccacttaacaggtggcagctatggagacagacggcttctagaacaagatggtattacttactatggcagagggaggtcactaagggatgttctcaagtcaatcttctcctctggactaacagtctgggaatggtggggtgacagaacccagctagtgaggtggtggggactgtgagacaatgaagaatagaaccaggattcacatgcagaaaggagaaagtgtaagcagcaaatagtcctggggtggtccacagagggatggaaaatccaggccccaaagggcttaaagcaggcccaaaattgtgccaggtgtggcggccgctagtgtttccaacaatatctgagacaaccttcagacactggtgctaatccaagaagcgacagcagacaaaaatgggaagtgctactctggatagtgccctcgagccccatgctctgcctgttgctcatacaccagccagacagaaaagagcctggcggcatcccagaccaagaacatgcctggcaacctcctgcctcagactaagaccaagatggggccactgctacagcctcacactgaatacctcagctccagagcagctcactgccacctgagctggctctagatgaatcaccctgggcccagccacatgccccaagggccaccggaggtaggctgataatagagtgagacgacaatactaggatgagaggcacataacgaatgcattttcctagccagtttgtccgctctgagatccaggtgctgctgtcacaccctgccaggtgctgccttggctcccaccatgcatgaggcttcagaagcctctgacttgagggaaaggactgcccacaaaacctgagtccactcagtagacaacttacttattgaagagatgattgtccaccttgatcttgctgtaggctttgaagtcatctggcattagcatgacaggaacaggaacattgctcagctcattgatctgaaaagcaaggagaacgtaaggctctcagccaggaggccacctgcctcagagacactaagctacaatgtggatgccacaatcttgctaaaagcatgtccaagtttccctctctgtctttttttgtttttttgagacagggtctcattctgtcacccaggctgaagtgcagtggcatgacaatggctcattgcagccttcacctcctggactcaagcaatctgcccacaccagccccccaagtagctgggactacaggtgcacatcaccacgcccagctaatttttttgtattgtgtagagacaagttctcactgtcctgagctcaagcaatcctccagacttggcctcccaaattattgggattacaggtgtcagccaccacacctggcccctccctgcctttatttctgttcttctcttcaagtaagttcccaaccttgtcctattttacctattgaaactctccacctgataagggccagctcaaaaggcacctcctccatgaagttttccaagattctctagaccatcaataccctttcccatcttggaattcctgaagttttctttgtatctgtcttctggccatctcacagtctctcatattgtagttaatgcctataaacctcacctgctagagttaagctaggcaatactatattatttatctttctttttctttttctttgagacggagttttgctgttgttgcccaggctggagtgcaatggcacgatctcagctcactgcaatctccacctcctggcctcaagtgattctcctgcctcagcctcccaagtagctgggattacaggcatgcaccaccatgtccagctaatttttttttgtatttttagtagagacagggtttcatcatgttggtcaggctggtcttgaactcttgacctcaggtgatccacctgccctggcctcccaaagtgttgggattacaggcgtgagccaccacgctcggctttaattatatttctaagcaaagagcatcctactaatctttggggcaccacagtgcttggcaccattactagcatatatggcagatactcaataaatatttgtcatatgcaataataaatgatcaatagataaatgtctcccaacctaagtgggtattaattaaggcctttgaatatcttcatacaaattgtgggtcactcaagaaattagctcaaggaagaaaaaaagctggatgggtttgtgtggacttgtaactcatatccccaaggtaatagattaaatttatttatttatttatttatttatttatttatttatttatagacagagtctcactgtgtcgcccagactggagtacagtggtgcgatctcagctcactgcaagctccgcctcctgggttcacaccattctcctgcctcagcctccagagtagctgggactacaggtgcccgacaccacacctggctaattttttgtatttttagtagagacagggtttcaccatgttagcctggatagtctcgatctcctgagctcgtgatccacccacctcggcctcccaaagtgctgggattacaggcatgagccactgcgcccggctgtaatagattaaagtgagcagtagtaaatgtctggccactgccccacttggaccctcctgataaaagcagggccaggcctggcacagtggctcatgcctgtaatcccagtactttggaaggccaaggcaggaggatcacttgaggccaggagttctataccaccctgggcaacacagcaagaccctatctctaaaaaaaataattaaatgtgaagctgaggcaggcagatcacctgaggtaaggagttcaagaccagcctggccaatatggtgaaaccctatctctactaaaaatacaaaaaaattagctgggtgtggtggaagccacctgtaattccagctactcgggaggctgaggcaggagaatcgtttgaacccaggaggcataaggtatagtgggccgagatcgcgccactgcctgggcaacaagagtgagactctgtctcaaaaaaaaaaaaaaattaaacacattagccaggcatagtcgtgtacacctatcatcctagctactcaggaggctgaggtgggaggattgcttgaggccaggagtttgaggttacagtgagctgactgcaccactgcactgcactctagcctgggcaagagtgagatcttgtctcaaaaaagaaaataaaataaagcagggccagttcctgatgtcaagtcctgccatacactaaactaagggagatggggcaggatgccttgcctctactgcaaacaaaccttctgactttcatcccttcagggagctggatcctagacagagagctagctttccattggtgcagagatgagggcagatcctgcccttccccacctcgagtttagccagttagtggtctaattaaccacagatgtcctctcccatcacagcagagtatttgacatttgaccctcaacccagttgccactaatgcattcaggatttacagaggaaaccttagtcctgacttaatggactggggggagggggcacagccttgtgtctcccactttccttgcaaatcctgttatctcaatgaggccccaggtggcagtgaggggataacctagagtcattagaactcctccaggagcataaatgggggaaatggcatttaatttgctgctccttttatgttacaaaccttttttatttagaaatgtcagagaatggaggaagttcaagttaatgcagtaactgggctggggaaccatatcttcctagagttgggaaaaaacccaatttactcatggagaaatgaaggaagccataggaatgcacgtgctttgagagggatgctgggggcagggtagtttataagttggcagtggagcagacactaggtaaactgctggcaaaaactggcatagacacaagagtgtatcctgtataattccatttatatgaaattctacagcaggcatctataatgagagaaatgagatgagttgcctggccagggggcggggggtgctgagtgtaaagggacatgagaagtgtgattctacggtgacagaaatgttttatatgttgcttggggtgatggttacatgagcaaatacatttgctgaaattcatcaaattgtatacttaaaatacgcacacttaatatacataaattattcctcaataaagttgatttttaaattcccagcatcaagctctgtgatacccttcattggctaaaccctcccaatagccaaaaaaaaccccagaagagtcatgccagttcctattccagggggtgctcacaagagaatgtgactgtcaaatctgtgcctacagaggaaaccattccacttctttgtttttctgccaacagaaacaattcgtggtggctgtcccatttcctttttcctggcatatcaagcctggctccgagacttaaagggaaaacagagacaaagagttcagggctcggctgggcgcagtggctcacgcctataatcccaacactttgggaggcctaaggggacggatcacgaggtcagaagatcgagtcttgctctgttgcccaggctggagtgcagtggcagaatctccgctcactgcaacctctgcctcctgggttcaagcgattctcctgcctcagtctcctgagtagctgggattacaggcgcatgtcaccatgccctgctaatttttgtatttttagtaaagatggggtttcaccatgttggtcaggctggtctcgaattcctgacctcgtgatctgcctgcctcagcctcccaaaatgctgggattacagatgtgagctactgcacctggcccagcctaggaaatttttaactcagctaacattggtgaacaatccatatctcaactaggggagacttacccctcatttctactaggccacatgtagatgattcactgtagggattagccctattattattatttttttagttgtgtgaaattttatatcccagagagttctattccatttcaattgaactgttcctattgaaatatctgctacgtgcttcattctgttaggtaggtgtgtgggaggaggagaacacaaggggagaaagtgttgtacatgcaaaagaaacaggaggcttataatctcatcagggagatgaaaaaaaaccctgacaccctcaaagtcaaagcagtatgcaattaagtgagaatccagggatacagacatcaagaacagcagaggctcagagaaggatgaggctagcatggccagagggtcaggctcccagtcctcatacatcaggccagaaacaaggcacctaatgcctctcctggtattgcaccaagagcacttgacattaggagaatctacaagatcatgctacactcctgcttagaaatcttccatggctgctcctctcaacctcagggtaaagttttaactgcttagcctggcattcaaggcctttcctaatctggctcagactgccaatttttttttttttttttttttttttttgagatagagctttgctctggtttcccaggctggagtgcaatggcgtgctcaccgcaacttccgcctcccgggttcaagcaattctcctgcctcagcctcctgagtagctcggattataggcatgcaccaccatgcccggctaattttgtatttttagtagagatggggtttctccatgttggccaggctggtctcgaactcccgaccttaggagatccacctgcctcggcctcccaaagtgctaggattacaggcgtgagccaccgcgcccagccagactgccaaatttctattcaatttacttctactcagtgtattaagggccttactatatgctaggagctggggatacaaaaccaaaaagacatctgcagagctgggcgtagtggctcacgcctgtaattccagcactttgggaggccgaggcgggcggatcatgaggtcaggagatcaagaccatcctggctaacacagtgaaaccccgtctctactaaaaaaaaatacaaaaaaaaattaacggagcatgatggcgggcacctgtagtcccagctactcgggaggctgaggcaggagaatggcgtgaacccacaaggcggagcttgcagtgagccgagttcatgccactgtgctccagcctgggtgacagaaccagactccgtctcaaaaaaaaaaaagcaatgagttcactctatgctgatctactggagatgaaaattccttgattgattgattgagacagggtctcacttccataggccaggctagagtgcagtggtatgatctcagctcactgcagcctcaacttcctgagctcaggtgattctcccatctcagcctccctagtagatgggactacaggtgtgccatcatgcccagctaattttatttctagtagagacaagttttcgccatgttgcccaggctggtttcaaagccctgggctcaagcaatccatccacctcagtctctcaaagtgagaggtatgattctgttgtacatatacaacagaatactattcagcctttaaaaaaaagaagaaaattctgcaatatgcaacatggagatgaaaattcagcagctagttctagtctggtgaacttgtgtgtccagaagcctccacttccctgtgcgaccttcataggaattgttacctaggatgcctggactaggcatgcaggtttcctgacatgttccagtcctctgctgtcggttcagcagtgggctggccaccaccagcaatcacttgttacctgccaccatcagaaaacatgacatgctagaaatacactcacaggaccgaggaggtccaaagcaagaactgcaactccagagaggaagagagggccacaggagccaataaatctaccggtgtttactcctcctttccatatcttgctttctccttctcctgctgtttgagtcccactgctccctgtgaggtgggaaggcctgctaaaagaaacttcattcaaaggcctgagtaggaatgttctctaaagatttttttttttttgaaacggagtctcactctgtcgcccaggctggagtgcaatggcgcgatctctgctcactgcaacctccgcctcccggattcaagccattctcctgcctcagcctcttgggtagatgggattacaggcgcatgccaccacacccggcaaatttttgtatttttagtagagacagggtttcgccatgttggccaggctggtgtcaaactcctgacctcaagtgatccgcctgcctcggcctcccaaagtgctgggatcacaggcgtaagccactgctcccagccatctctgaagattttttcttttttttttttttttgagacggagttttgctcgtcacccaggctggagtgcaatgccgccatcttggctcaatgcaaccgccgtctcccaggttcaagtgattctcctgcctcagcctcccgagtagctgggattacaggcatgcgccaccatgcccgactaatttttgtatttttagtagagacggggtttcaccatgttggccaggctggtcttgaactcctgacctcaggtgatccgcccaccttggcctccctaactgctgggattacaggcgtgagccaccatgccaggcccctctgaagatttttaaagcagtagggcaagataaaaagacaggtaaaggaggtcagtggctcacgcctgtaatcctagcactttggaagaccgaggtgggcaaatcgcttgagcccaggatttcgagaccagcctgggcaacatggcaaaaccccgactcttcaaaaaatacaagtgttagtcgggtgtggtggcatgtgcctgtagtcccagctactcgggtggctaaggcaggagaatcacctgagcatggggaggtaggggcttcattgagccgtgattgtgccactgcacttcagcctgtgcaagagcgcgagaccctgcctcaaaaaaacaaacaaaaaaaaaaacaagaaagaaagaaaatgtatggacagaacagaactggggtggaatgtaggagagaaattgagcagactaaagaataaatctgtccctcacaccatacccaaaagtgaattcaaaatggattacagacttaaatgtaagaactaaaactatacatactccagcactattcacaagagctaaggtgtgaaaacaaatccatcaacagatgataaagaaaatgtggtatacatatacaacagaatactattcagccttaataaaagaaggaaattctgctatgtgcaacatggatgaaccttgagcaccttacgctgagatcagctagtcgcagaaaaacatatattgcatgattctccttatataaggtttcaaaacagtccaattcatagaaacaaagagtagaatggtggttgccaggggctgggggcgggggaaatggggagttaattggtaggcataaagtttcattcaagcgagatgaatacgctctacagagctgcactatgacactgttcccatggtcatcaataacataatcgtacacttaaaattttgtcatgagagtacatcttatgttaaatgttctgaccacaatacaattaaaaaaaaaaaaagaagaagaagaaagaaagagctaaaactctagttgggaggattgcttcaggccagaagtttgagaacatcctgggcaatacagagaaaccccaattcattaaaaaaaaaaaaaaaaaaaaaaagagctagaactataaaacttttagaagaaaacaaaggagtaaatcttcatgaccttgggttaggcaatgtcttcttagatataacaccaaaagcacacacaacaacaacaaaaaagataaactggactttattaaagttaaaaacttgaacttcaaaagataccataagaaaaatgaaaaaggcaggccaggtgcagtggctcacgcctgtaatcccaccactttgggaggccgaggcggggggattgcttgaggccaggagttcgagaccagtctggccaacatggcaaaaccctgtctctactaaaaatacaaaaattagcctggtgtggtggcgggcacctgtaatcccagttactcaggaggctgaggcaggagaatcgcttgaacccgggaggcagaggttgcagtgagccaagatcacaccgttgcactccagccagggcgacagagcaaaactccatctcaaaaaaaaaaaaaaaaaaaaaaaaagaaaaatgaaaaagacaactcaatgaataggataaaatatttgcaaatcatatatctgataagggacctgtatctagaatataaaaagaattcttgtaactcaataataagaagataacccaatttaataatgggcaaaaagatctttgtaaatgggcaaaaaatttaatagacattctccaaagaaaagataccaatgaaggctggggatgtggctcatgcctgcaatcccagtcctttgggaggccaaggcgggaggaccacttgaggccaggagttcaggaccagcctcggcaacaaagcgagaccctgtctctacaacaacaacaaaaagaaaatgtacaggccaggcacagtggctcacacctgtaatcccagcactctgggaagccaaggcaggtggatcacctgaggttaggagtttgagatcagcctggacaacatggtaaaactccatatctactaagaatacaaaagttagctgggtgtggtggcaggcacctgtaatccgaggtacttgggaggctgaggcaggagaatcgcttgaaccaaggaggcggaggttacagtgaactgagattgtggcactaaactccagcctgggcgacagagcaagactctgtctcaagaaaaaaaaaaaaagaaaagaatatgtacaaatggccagtaagtacatgaaaaaatgctcaacatcattagttatcacagaaatgccaatcaaagtcacaatgaggccgggtgcgatggctcatgcctgtaatcccagcactttgggaggccgaggcaggtggatcacctgaggtcaggagtttgagacaagcctggccgacatggtgaaaccttgtctctactaaaataaaaaaattagccacgtgtggtggcaggcatctgtaatcccagctactgaggaggctgaagcaggagaattgcttgaacccgggaggtggaggttgcggtgagccgagattgcaccactgcactccagcctgggtgacggagtgagactccatcacaaaaacaaacaaacaaacaaaatcacaatgagatacgaattcacacccaacagaatggctttaataactttaaaaagacaataacaagtgttgacaaggatgcagatactggaactcttatacactgctggtagacatgtaaaatggtacagccactttagagaacagtttggcagtttctcaaatggttaaatacagagtcaccatcaactgctcctgctcctctgatccctgtggtaaggcttcacacatacctggttcttaaaatggccaacaagtatcaagtcaggtctacctcccatggtctccatgctcctctctgaggccatctcttccctaattccaaaccctcggaactgtatttcatccactaaaacactggtttttgctcttcactagttcttccctgacaggtgcaaagtcttctgatttttctccttgtttcctacacattcttcctccacaaaatccatgggctcttgtccatgagagcagctcctgtgacaacaccaagttcaaagtcctctctttttccacctagaagtaaactaatcacctcatgaaagggtaactaacttctgctgtagataaagacatatccatccttcctatctgaaacaccattagccacagaccagcatgcctaaatgcctaaacaggtgagaaactaaagaaaaggtggtatctgaaatctcagatgacaaaatgttacaaagtaggctttttttgaagggaggaaatctccaaaaaagtgcagcagtccaccgagggcaatgtggtcctgatcccttagacgagtgcaagattacactcttcttctaggcagatgtctcagttcccaaatggggacactgaagtatcagaccttactgcagaccaggatgaagcaataaaacttacgactaactggcctctgaagcttagcctgtccagggcagtggtgggaagttcccatgagatgcctgttcattatgtccagaggcacggatcttgcttaaagtcaatgcctttccaactagcccctcaaacaaactttcaacttaaagttagcaaagaaaaaagatgaccactttgtccaacagagtaggactcacaggactcctgactcgtgatacctaaccatcagctattgagaaacttcataaccacatatggacagactcatgcctgcctatcggaacaccatgcatcacacacactcccaggacctgacatgcataggcgtataacccagagcatatattcaccttctctaaccggactatacttcgcatctatcctgagacttggctgagggagaggaaaagaaacaggaggcaaagaaaacaagaccagccactcaggcaccacccttggccgatacagtcccatggtgctagacaataagcgacatctcttgctgtaaccacaggcaagctaatcctccacctgaggcctccttttcttcatgtgtaaaataagggacccaaggttcattgcagctagctgtaatactcctgactctcaggcctctaccagttctctacagacaggttgctttctgtgagaaacagaaccagcagagagaggcctggtagagtgagaagcaggatgcagaacaaaatcaaggattgacttccagaaagggacatggggttcatattctgatcacccagtttccctagaaatgttgtcagatgacccctgggacagcaggaagaccgagtaacaaactgggctggattgttggcccgaagcagctcctagaggtctgggcattataccactggtactcgctatcctggcaggaccctcactaacaccagtgatgacagtgaaaacagtaacctgcccaagaccaagaaaccacagagacctcaatttacacatgcactttcctaaatgacaggtcaagatctaaaaccctagctcagattacggttcatcgatctccacccaaaggcaccttcagctcctctgccaaagcaatgcaaagtcttgctggccctctttgtcatcgcttggtcttgtgagcaatttcaagcactcacaagtgaacctaaagaactgaaatccacaggaaacccaagcttgatcctccttattccaaaattctagttagtgaagttggtgtttcgggtccttttacttcctctgctcattcctagtgtggggattcataaagaaatggtcagaaggcaaagagcaagtggttggaagagggagaataaagaccctgaacaaacaccacataaacagtcttccagcttaaactgtcaggatccaacttcctggcaggggctgttgaacaatctcaaagcaccctaaggacccaggggacctatctctcctatctaggaccataatcactatgcatcatcacaacattgcagccacacaacagataagtcaacatctttaaaatgatcaccttcaaaaactatgggaagacatattatttctactatgaatagtccctccttataaccaggcatcctcttctctcaaatggttaatagccattctttcttctccctaacccagagagacccaggtgaagtgtctggttcaaggaagcctgtgcttctccagttgatacatcttgttcaagagggaaaaaaaaggaaacccagggtggagttctacattcaaaggtaaggaggcctggaggatggaagaatttgagcagccacaacaaccaaacgatcagaaagagaggactatttgggcagaccactgctacttgacagagctggcagccggctgtaaggaacaagggggaatatacaccctcacaaacaggatgaggggggaggaggagaagcagggatgaaagcgactccactgcactgaggccttgcctttgcgctccatgggctgccccaagcgagcacgccacacgcaggaagccagaagggctggagggaaggggaggtggcgacggcagaccacagagacaccaggcctcgcgtggcgtgcggggagtgcacacggggccgaaaggcgtgcaagggtggggtgggcgtgcaagtggcttggcgaggggtggcaggcgtcaccggcagggcctgcggggcaagggcccagggctgcagggggcgtgggagcgcgcggggccgcgctcagaggggcgcgcaggagctggttaccgtgtggttcaccccccacatcaggacgctgaggatcggctcgctggcccggaatagcttcactttctggcacacgaaatgcttcttcttggtcttggtcttgctggcgctgagcggcgccaccgccaccgccgtggtgctggtgcagttggacgacatgcccggggcggcggcggcggcggcgaaagaggggggcggcggagacagcgcacaagccagcggcctcaggcctcccccggaccgatccccacccccgctccctcaccgcgccatggtcgcgcccgtcccgttacctcccaccccgccccggtggttccgtccgccccacgccccgccctcccgccccgccccggggagcccgccggcccgctccgcaccccgcccccgggcggtgcagccgccctgcagtcccctggccccgtcctccccgtccgcgtggtacggcccgtcccggggaggcagcggccgccccgcccgcccctcctccccgggcctgacagaaacccgcctggcctccgaacgcctcggggccccgtgccggagccggaaggggaggagggctgggcaggcgtcgctgtggaccgcgggaggggctccccgcccgggccccccaacgccagggtttggctctttcccgcaacccgaatgccaagatggcggcgatgccaccgctccggaagggaaggagggacgggaatgcgaggagggcgggacgtaccatgcccaccccgggggagaggagggacgcagcaaggggaagagaaagtccagcctagaaagccaaggaacgccccctcgctccacctaagcgtggatctgcccactctgctgggccccgggcgcgctccacccgcggggcacgccccttgcccccagggccaatgagagaagcaggccaggaacactggtttttatgaatgggccccgcgcccacccacctgctgcctgttctccccgcaaagggtcagagctcagaggccgccagcaccttcagacacctatcccactaatcgtcttactctggctcatttcgtaaaatctttgagtaaactgccccacgctttgttacataattctcagatgagggatctccatatattcgacacaaattacaggtcaacgttgttctttctgcatggaaattcgtaaacacggtactccacaggtggtcgctctttaaacagttacaaaaataaatgtggcctttattaccaattataaaataaacataattaaccccggcataatgaagtgattaaatgaataaaaacgtatgttacattctctagggaaagatcgggtttcaagcattacagtgcctggcatcataagtgttcaaaaacagaaatccaaatacattttaagcagaattaggaattagcagaacaaggaaatcgcccagctaatgtgcgggtcaagagggcctaggagttcactggtcaaatgagggcttctggtgaaagaatagagaagggaaaaggagtaaagacaggagagtggcccctcgagggttttgttttgttgctgttgttttttgagacggaatctcgctctgtcacccaggctggagtgcggtggcacaatctcggctcactgcaagctccgcctcctgggttcacgccattctcctgcctcagcctcccgagtagctgggactacaggcgcccgccaccacgcccggctaattttttgtatttttttagtagagacggggtttcaccgtgttcgccaggatggtctcgatctcctgacctcgtgatccgcccacctcagcctcccaaagtgctgagattacaggtgtgagccaccgcgcccagcctgttttttgttttttttttagtacctgactgaaagagactagcaaacaactcctgaaaatctgtaattgtagtaaggttactacacggtaagaagtgaagccgcaaaataaaaacttccattttattttcctttaggagccatggagcatattggcaatttggttctgactcctaaaatcattttactatacctttacactgcctacattggagactgcaagcagtggaaaagaatagatactccagatctcgtcgataaacccaggctcctcctaaaccagccagattcagagagaaaaacgagctggcctgccttattgtattacttgccatcaaggttcaatgtggttctattacccagtaaagtcattgaccaaacaaggtattttcacaaagctaaccttttttaaaagcatgtaaaaattgtacatttgtacatatacgcattacaattttacatccaaagatcaaatagttaacagttcatttagggctttttgtattgtttgattttccagattctgtcactcccttggctttgacctaacctgacatcattctgtcacattatcttctaaatcaagtaaacgttcatttgtctcagtaagcacaatctatctgggtgacaccagagaggtttctgaagggtctggtgtacgctgaggcagtgaaataggtctgttggcacaggtaagaaggaagtggcatgataaacatcacaaccccagggaacagccttccagagtggcacaagcactcccaccgagatggtccagtgcccacccgttaaagagtcaaaacccaaagttactgagtgtcccacaaagcaagtcacactagctctcaaaggaagtgagctgtttcaggactcaatgaagcagggtcactttgaacactggtggtttgacatctgtgaaagaagtcatttgaactcttataaagagaattaaggggtcagcagcttccctggaaaatgcaggaaaaccaataagagaggggacagttttcatcttttcataaagttcttctccagagctaccgaagttctctgtaaagagtagatattccgcttcacccgatcctccagggaggaagtagatgcactctccagcttcatgcggctaggaagagaagacaggcaaatgcaagtcaaaaacattttcaatcagtcaactattctggcagcttcagaagaaatgggttgttagccatagagcagctgtaaaaacacaacctcttttaagctcccatagataactttcgagtgactccacctggaaccaaatgtttttaaaccagtgtccataagggaaaatgtatctgttttggaaaataagtcaaagcctcattggaaaaaggcttcctgggccatgaattcttattaaaaaggaaggtcaaggaatttcaatgatttagaaaataccaaattcacttctcctcccctcaaatgaaaaacatcccactgtgtggtcagaaaggaagagtagtagccaaggtggtctgaaggctgggctccatgtgcaaacacagaaacactggaacgggaaccagctgccagcctgcctcttaagaccttccccatgaaagaccctggcaggaagaagatgcactcactggatgaacttcccatcccgggagtccagcttctctagcctctgctcccgttcctcatccttagcatgcctcttgaggatgttcagtctctcctcctccctccatttggcgttttccatcatctcttgccgttttcgctctaattcctctgcagagagttttctgttgagcacagaaaccatacgatcaggtctcttccagcaaaaaaaccagaagcagcacaagaagcacagaagccaggtgggaccccaagctctccagttcactgctctctccaagtgcaaggccagcctgagttcccttctaacgtcctggtcaggaggtttcatccaaatttcaaaggcttttagtaaagtattccataatctcactcagtaatctctagagtgattattctgaaatatgaaatatgaaataaattgggaactcatcaggaacctaaacttgtagcaattatatcccaatggtttgctcaacaattgacagaagaacagaagactaggttatccatgtaactgttaacatctaccatctaactacccattggagactagaaattcatgacacagcccatgagtacactactttaggactaagctagaagccagaagctgaaggaataacttagcctcagaaaataataaatagggccaggcatggtggctcacgcctgtaatcccagcactttgggaggccaaggcgggcagatcacctgacgtcaggagttcgagaccagcctggccaacatggggaaaccctgtctctactaaaattacaaaaataagctgggtgtggtggtgtgtgcctgtaatcccagctacttgggaggctgaggcaggagaatcgcttgaaccgaggaggcggaggttgcagtgagccaagatcgcaccactgcactccagcctgggtgacagagtgagtctctgtctcaaaaaaaaataaaaacctccaaacgaaaaacaatttactattaaaaatctgcttcagataataaatgaaagatattagagcattcaaatgagagtaggaggcttaaaaaaaaaaaacaaaaacgattgccaggcacagtggctctagcccgtaatcccagcactttgggaggcttaggcaggaggattgcttgagtccaagagttcaagaccagcctaggcaacaaagtgagacctcccatctctgcaaaaaaaaaatttttttttaattagttgggcatggtggcacccgtgtagccccaactatttggaaggctgaggtaggaggatcagttgaacctgggagtgtgaggctgcagtaagccatgatcgccccactgcactccaacctaggcaacagagtgagaccttgtagggagaagaaagaagttatcaaagaaataatacaagaaaatttcctagaactcaaagacatggtttagattgcaggaagcaaatactgacactaggaaaaaatatacaaatcatacaagaaaggaaatgtaacctccatattctgcttggcttaggaatgaaaagtatcagtaaacaatatttatatatcatacaagtatgaatccacatactcactgaaccaaaaattctgatgtaaccatattggaaagatagggatagaagaaacatgggactaggagtgtatgagagctcatttacactaacagattatttactataacagtaagaaaatatctaagatctggccgggcacggtggctcacacctgtaatcctaacactttgggaggccaaggcaggtggattgcctgagctcaggagttccagaccagcctggacaacacattgaaaccccatctatattaaaaatacaaaaattagggccaggtgctgtggctcatgcctgtaatccgaacactttgggaggctgaggcgggcagatcacctgacctcaggagttcaagaccagcctgaccaatatggtgaaaccccatctctactaaaatatacaaaaattagctgggcatggtggcatgcgcctgtagtcccagctactcgggaggctgaggcaggagaatcgctggaacccgggaggcagaggttgcagtgagccgagatcgtgccactgcgctgcagcctgggcgacagagcgagacaaaaaaaaaaaaaaaaaaaaaggaagcccgggcgtggtggctcacgcctgtaatcccagcactctgggaggccgaggcaggcagatcacctgaggttgggagttcgagaccagcctgaccaacatggagaaagcctgtctctactaaaaatacaaaaattagctgggtgtggtggcacatgcctgtaatcccagctacctaggaggctgaggcaggagaatcacttgggcccaggaggcggaagttgtggtgagccgagattgggccattgcactccagcctgggcaacaagaatgaaactccatctcagaaaaaaaaaaaaaaaattagctgggcgtgacaacatgtgcctgtagtcccagctactcgggaggctgggacaggagaatcacttgaaccccggaggcagaggttgtagtgagccaagattgtggcactgcactccagcctgggagatacaacaagatgctgtctccaaaaaaaacaaagaaagaaaaaagaaaatatctaatatctaaaattaatggatgaagaggcagcaacatatttgtatttttaggaatatgtagctatgaaaagaaactactgaaaaagctgaaagtagttgcctttgggtagcatgactaaaagtgggatcaggcagggcaaagaactactagcttttgtttttttaaatgtttttaaaataattttttgtagagatagtgtcttattatgttgctcagactggtctggaactcctggcctcaagcgatcctcctgccttggactctcaaactgctgggattacaggtatgagccaccacacccagagagaataattgaggggttttttaaagagggtttaatttaagagagggtctcgctctgtcgcccaagcaagaatgcagtggcttgatcgtagctcactgcaaccttaatcccttgaccttaagtgatcctccctgccttagcctcccaaagcgctgagattacaagcatggactgctgtgtctggcttggtttttgttaagagacttttttttttttttgagacaaagtcttgcactgtcgcctgggctgctgtgcagtggtgagatctcagctcactgtaacctccaacccctgggttcaagcagttctcctgtctcagcctcccaaataactgggattacaggcatgtgccaccatgaccaactaattttatatttttagtagagatggggtttcaccgtgttggttaggatggtctcgacctcctgacctcaggtgatccacccacctcagcctcccaaactgctgtgattacaggcgtgagccaccacgcccagccttacctcgtcctttcaatgtcctcacatggctggaggcaggggacgcagacccttacaggttggcaagataaataaaagttggttcgtcgaaaaggtaatgatggattatccatttgccatggtttgagccccttctagattcaggcctgcaaaatgtggttaatcaactgggctcctgactcacctggtgtatccgggagcatgtcgcctttggtagacctcttttttaggtgatgggctcctagtttggcctgtctctctcctgttcaccttagagttgtgcctgtagcagacacagaaggcaaagaggaaaaagcctttttggtccaggggcttacactgaatccctcaaacaatgcaagatgagctaatggtcttagaggtataatctaagtgtgagaaaaacaaaggtatagggtttgatgttagactcaccccagagctcccaaagcacagaatacacctacagatatgtggctttggatgcctgagctttacattgaggtggaaaaaaaaaatgatgtaaaggaaataccaaagcaaagacatttgggaaagtcaatggacggacatcaccaaaagcaaaaacaaatgcctgctgggaccaggcccccacagtcacaggttatttcccagtgaatcccacactcacagtttgctgggtcttggggaccgtgaccttctgcccagggatcgagacctcctgtcccgggaccctgcttccctggtgctcttcttgctggcatgtcttgggggtgagtgggaggagcttctggatctggaatggttcttcatcccatgccctctcttttgctctgctgtcagaggaccctgaagaccctggttacggtcagagttccggacctacatcattaaggaaaagagaagttattcacatggaaaatccagctattcaggagaaaacgcggccgggctcagtggctcacgcctgtaatcccagcactttgggaggccgaggcgggggggatcacctgaggtcaggagttcgagaccagcctggccaacatggtgaaaccctgtctctactgaaaattaaaaaattagctgggcgtggtggtgggcacctgtaatcccagctactcagaaggctgaggcaggagaattgcttgaactcaggaggtggaggttgcagtgagctgagatcgcaccactgcactccagcctggatgacagagcgagactccgtctcaaaaaaaaaaaaaaaaaaaagaaaaggcagtgaaacaggaaatgttacataaggagctcactgagcacaccaatatcatcacatagaattatcacagagaactgtataaacttagttatctgcagaatcccctaaaagaatctccttcggtcagccaggtgcagtcgctcacaccttgaatcccaacactttgggagacggaggcaggaggactgcctgagatcaagagtttgataccacccagagcaactagtgagaccttgtctctacaaaatatttaaaaattagctcggtgtggcagcacacgcctgtagtcccagctactcaggaggttgaggcagaaggatcccttgagcctaagaggtcaagacagcagtgagccaggatcacaccactgcactccagcttggatgagagagaaagaccctgtctcaaaaaaaaaaaaaaaaaagatggctgggtgctgtggctcatgcctgtaatcccagcactttgggaggctgaggcaggcagatcacgaggccaggagatcaagaccatcctagctaacatggtgaaacactgtctctactaaaaatacaaaataattagctgggcatggtgggcacctgtagtcccagctacttgggaagctgaggcaggagaatggcatgaacccaggaggcagagcttgcagtgagccgagatggcgccactgcattccagcctaggcgacagagtgagactccatctcaaaaaaaaaaaaaaaaagaaaagaaaagaaaagaatatacctggcttggctgggtgcagtggctcacgcctgtaatcccagcactttgggaggccaagacgggcagatcacaaggtcgggagttcgagaccagcctggccaatatggtcaaacccctctctactaaaaatacaaaaattagccgggtgtggtggtgggtgcccgtagtcccagctgctcaagaggctgagacaggagaatcacttgaatgcaggaggcagaggttgcagtgagccgagatcgcaccattgcactccagcctgggcgacagagcgagactccctctcaaaaaaaaaaaagaaagaaaagaatacacctggcttagctcttcactataggttaaggaagagcgagatgcagaagcatggaggacaggacccaaggttaaaaatacagaaatatgaggccaggcatggtggctcacgcctataatcccagcactttgggaggccgagacaggcggatagcttgaggccaggagtttgagaccagcctgacgaacatggagaaaccctgtctctattaaaaatacaaaaattagccaggtgtgatggcaggtgcctgtaatcccagctactcaggaggctgaggcaggagaatcgcttgaacccaggaggcagaggttgcagtgagctgagattgcaccattgcactccagcctggttgacatggagaaaccctgtctctactaaaaatacaaaattagccgggcatggtggtgcatgcctgtaatcccagctactcgggaggctgaggcaggagaattgcttgaacccaggaggtcgaggttgtggtgagctgagatcgcgccattgcactctaacctgggcaacaagagcaaaactccacctcaaaaaaaaaaaaaaaaaatacagaaatacagaagtcaagccaggtgccttgaacttgtacttccagctactcagaagattgcttaagctcaggagttcgagaccagcctaggcaaaataatgatgcactgctactcaaaaaaaaaaaaaaagaacccagcagatttatgtttgtcaaaaatcatcaacctacacacttaggccaggcacggtggctcacacctgtaatcccagcactttgggaggccgaggcggagggatcacctgaggtcaggagttcaagaccatcctggccaacatgacgaaaccctgtctctactaaaaatacaaaaattagtcgggcgtggtggtgggcgcctgtaatcccagctactcgggaggctaaagcaggagaatagcttgaacccggaaggcagaggttgcagtgagccgagatcgcgccactgcactccagcctgggtgacaagcgagactccgtctcaaaaaaaaaaaaaaacaaaaaaacctatacacttaaaatgtgtgcatttcatgtaaattatttgtagagggatgggtagaatgtctcaatgccccattggtggtttagtctctctgctcagagggtcatcagccacaagaaggtgctcagcgataagaatgggcctgtttcccagcagcccaggcttcactgcccacctccctgctatccacattgtccaagtggcacatcccacagtcccacagtcactcctttcaagaagcccacatccctacctgtaagccatatccagggactttggacaaaacaggggaggaatttgccatcttcttctgtgatctaagagatcaaaatacacacactcattgaaaaagaaaatatatataggtccaatttaaatatcttatgctgaactatgcttcttgcctccaatgtgacctttccgcctcccagcagttacctggcagtacgtttctctatttggactgtctatgccgaaaaatgcatcagcacaatcaaattttcctgtgaaaaactgtgggcctcgcttctaagccccaacgcctgaacaccttctcctctcacttcatgctgctattccagggacaaatagtgactcagcagcggcggagctgactgcttccacaggaagacatgcaaaatgggcccacatcagccatcagtccattaaaaaaagcctatataaagcccacttcagtcttgaaggaatcctaagctgagatgaaacagagtcacccccaggatgtctgacctacctaagacctactaggctaaagtcagcattattaagggtctctctccagcagcatggccaagatacccactcacatttagcatctccaaggaactctagcattagatggcaagctctgtgggcactgggcccatgttcaagtgttcatcactgaatgcccagtacctggcagcttccagcacagggcaggtgttcatgtctgtggaatgaatgagtgaatgagcaagtgaatcaacgagaagggaggccagtcgccacatgctcacctccctgcactgtgctcatcctcgctgctggaacgatcactactcgagcttctgtgcttatgtttcttgtgcttctttttcttctccttctttttcttcttctcctttttttccagactcatttgcaactggaaaatgccgagaacacaagcacacaagattactgagaccagccagcgcagtggctcatgcctgtaatcccagcactttgggaggctgagtggagcagatcatcacttgaggtccggagttcgagaccagcctggccaacatggcaaaaccccatctctactaaaaatacaaaaatcagctgggtgtggtggtgggcacctgtaataccagctacttgagaggtgaggtacaagaatcacctgaaccaggaggcagaggttgcagtgggccgagattgtgccactgcacttcagcctgggtgacagagtgaaactgtgtctcaaaaaaaaaaaaaaaaaaaaagattactggctgggcatggtggctcacgcctgtaatctctcagcactttgagaggctgaggtgggaggatcacaaggtcaggagttcgagaccaccctggccaatatggtgaaagaccatctctactaaaaatacaaaaattagctgggtgtggtggtgtgtacctgtagttctagctactcgggaggctgaggcagaagaatcacttgaacccaggaggcagaggttgcagtgagctgagatcacgccactgcactccagcagcctgggcgacagagtgagactccatctcattaaaaaaaaacaaaaagcccaggcggggtggctcatacctgtaatcccagcactttgggaggccaaggcgggtggatcacaaggtcaggagaaggagaccatcctggctaacacggtgaaacaccatcactactaaaaatacaaaaaattagctgggcatggtagcaggcgcctgtagtcccagctactcaggaggctgaggcaggagaatggcatgaacctgggaggcggagtttgcagtgagctaagatcgtgtcactgcaccactgcactccaccttgggcaacagagcgagactccgtctcaaaaaaaaaaaaaaaaaaaaagattactgagacccctatcagtctcctttgaggggcgtggctcatgcacaaactgcctgactccatgcctctgggtctacagaagtccaggacattataggggttccctgtcaacacaccaggggaagggtcttaaccctggccgtgcactaacacccccaactactgaactggtatctggtaggtgagactaagaatttgtgtttttaaacagtcaccaaaaccactgcctaggagtttccattctgtgtcacaggaactccaattccactgaaagcagtcaggaactataaggtcaatctttaactttccttaccaactgatccaagacacaattacataatatgtcatgtgaatggtaagtgggccctagaagccttatttttttttttttgagacagagtttcgctcttgttgcccaggctggagtgcaatggcgcaatcttggctcacagcaaactccatctcccgggttcaagcaagtctcctgcctcatcctcccaagtagctgggattacaggcatgaaccaccaccccggctaattttgaatttttagtagagacagggtttctccgtgttggtcaggctggtctcaaactcccaacctcaggtgatccacccgcctcggcctcccaaaatgctggaattacaggcatgagccaccgcgcccagcccctagaagctttataccacgaccaagggcatactccaacctcctgaacacactgcatggtaatgctttccacaggcttagcccacactcttcttctggaaaaacgacatcacatggtgcattctcccacccaaaagactttcaaccaaaatcaagcttaattaagcttaataaactaagattacataaaataaccaacctgaccaatatgaataaaccccgtctctactaaaaatacaaaattagccgggcgtggtggcacatccctgtaatcccagctactagggaggctgaggcaggagaataacttgaacctgggaggcggaggttgcggtgagctgagatcatgccattgcactccagcctgggcaacaagattgaaactccgtctcaaaaacaaaaaaatgattacataaaatagccacaacatggtctctaaaagacaaaagttttagaggccattctgtttttcccctggtaagctgagagtaaatggagagacgttctcacgttatatggctaaaagatgctcttggtgcttatctggtatactacttaccaattctttgattttcttcattttcactggattatttaatacctctcgttttttctcctcctccttcttcctaaagagagataattacaaaattcatgactatttcttttctccaaattctatggagtaaccttttctccaaacatatacagacaaactggcccatgttaaaatctacatgattagctgggtgtggtggtgtgcacctgtaatcccagctacttgggaggaggagaatcgctcccagctacttgagggaggagaatcgcttgaacctgggaggcggagattgcagtgagctgagatcgtgccactgcactccagcctgggtgacacagcaagactctgtctccaaaaaaaaaaaatctacatgatgatggggctgggtgcagtggctcatctcacacctgtaatcccagcactttgggaggctggggcaggcggatcacttgaggtcagaagttcaagaccagcctggccaacatggtgaaacctcgtctctaccaaaaaaaacaaaacaaaaaaattagccgggcatggtagcagcacgcacctgcagtcctagctactcgggaggctgacgtgggagaataacttaaacccaggaggcggaggttgcagtgagctgagattgtgccactgcactccagtctgggtgacggagtgagaccctgtctcaaaaaaaataaataaataaaaaacgacatgatggtgtcaaagccaaaaatctctcacaaatataagagattgtctcaaaaaaaaaaaaaaaaaaagagtcatgctcagtcgtccaggctgcagtgcagtggcatgatcatggctcactgcagccttgaccacctgggctcaagtgatactcccacatcagcttcccaagtggctgggactataggcccccaccaccatgcctagctaatttttatatttcttatagagatggggtttcaccatgttgctcaggctggtctcaatttcctgggctcaagcaatccatccatctctgcctcccaaagtgctgggattacaggtgtgatccaccgtacccggctgtcagttgttttttttgttgttgttgttgttttttcgagacggagtctcgctctttcgtccaggctagagtgcagtggcgcgatctcaggtcactgcaaactcctcctcccgggttcatgccattctcctgcctcagcctcctgagtagctgggactataggcgcctgccaccatgcctggctaattttttgtatttttagtagagacggggtttcaccgtgttagccaggatggtctcgatctcctgacctcgtgatccgcccgcctcggcctcctgaagtgctgggattacaggcgtgagccactgcttccagccgtgagttgttttttgatggttatagagtttcaattcagaatggtgaaagagttctggagacaggctgtggtgatggttgcacaacactttgactgtatttatttatttatttatttttattttttatttttatttttttttgagacggagtctcgctctgtcgcccaggctggaatgcagtggcgtgatctcggctcactgcaagcaccacctcagttcacgccattctcctgcctcagcctcccaaatagctgggactacaggcacccagggtctcattaatattatcaagaaaataggctgggcgtggtggctcacgcctgtaatcccagcactttgggaggccgaggcgggcggatcacaaggtggtcaggagatcgagaccatcctggctaacatagtgaaaccctgtctctgctaaaaaatacaacaaaaattagccaggcgtggtggtgggtgcctgtaatcccagctactcgggaggctgaggcaggaggatggcgtgaacccggcagacagagcttgtagtgagcagagatcgcgccactgcacttcagcctgggcgacagagcgagactccgtctcaaaaaaaaaaaaaaaaaaaaaagcgaagagaaaactgtaaagcaagagaatcaatggccttagcagggtctcaaagcatctgtaacaaacccccttcctagccccccattagtacctgatgatgaagagtgggtcctcccggatcttgctggccatgtcaagaagggaattggcacctgatggggcaaagatagagcctgggagaagtcctgtttcagaagagcagcctgcctccttctcctccatcttctcaaaaacatatttgtcaatggggcgccccagcaggtactcgtcacggttcaccatcccaccaggaccctggtacatccagtccaacttttcttcttttttcctggttcaagggaagaaaaagaaatacaatttctttaaaaagcagacttctgcaaacctacacctaaaacctggacacaagggagagagaaccacagctaatcagagttcattctactggcacctaccatgcaataaacacggcaccccatgtggccggcataaagaaatagtgcgggttgcgtgcagtggctcatgcctgtaatcccaccattttgggagtccgaagcgggtggatcacttgaggtcaggagttcgagaccagcctggccaacatgatgaaaccccatctctactaaaaatacaaaacattagccaggcgtggtggcggacgcctgtaatcccacctactcagaagggtgaggcaggaaaatcacttgaacctgggaggcagaggttgcagtaagatcacgccactgcactccagcctgggtgacggagccagaccttgtctcaaataaataaataaataaatggtgcttgtcctcatgaggcttacgagtgaatggagagagaatattcactcacataaagcaatttataaggaaaaccagtgttcctcaacatggggtgtggatcttggctcagagcttctcgagtctcctttacagagtctttatattatgctttcatttccaagatgacctaaaacaatgaataagcacattctacatcaccatcttaccatcaagaacaatttcagtgaccacatacgcagttgcattgattgtgcatcttggtgcttgtgggcacacagacaccagcggtaacactacacatttgaggggatgatgggaaaaaatcagaggtaactgaataagtgacgctttcaagccaaaagagccaaacactgaatacgtgaatcattaggtaactatctgggtttcacaagtgaataaaccctggtctcagccatctaggggccaaattaagtcacagcatcatgccacacaaacatttccctgcggttctgggagaaaaaagtggtgagaaagtggaaccctcataccacagacagtaaaggcaggctaaattcataagagcatgcgtggaagcagccaatactacattcacactgcaaccaggaaagtactttcattgacagtattatctataacctgaaattaaatgctttttgaatatgacttttttgttcttttttttcttttagacacagggtctcactctgtcacccaggctggaatgcaatggtgcgatcatggctcactgcagccttgaattcctgggctcaacaaatcctgcctcagcctcccaagtagctgggactacagggatgcaccaccatgccttgctgattttttattttttcaatttttaaacagatgggacttgctatgttgcccaggctagtctcaaactactggcctcaagtgatcctcctgcctcagcctcccaaagtgctgggattacaagggtgagccaccatgcccaacctgaatatgactttttaaatgtgtatacttgtttttgaggttatataacaactgtgagcataaagaatgttttcctagttgcatgcttggacatttttggtaagaataatttaaaccaacactgcagggccatgacccttttttttttcccccagacagagtttcactctgttgcccaggctggagtgcagtggagcgatcttggctcacggcaacctctgcctcccaggttcaagttattctcctgcctcagcctcccgaatagctgggactataggcatgtgtcaccaagactggctaattttttgtacttttagtaaagacgaggtttcaccgtgttggccaggctggtcgatctcctgaccccgtgatctgccagccttggcctcccaaagtgctgggattacaggcgtgagcaaccgtgcctggccccaagaccctttagaatttttttcatattaaaaaaatgagtctgagaaacactgtagtctacagttaagaactgatcagctgggcacggtggctcacacttataatcctagaactttgggaggccaagacaggctgatcacgaggtcaggagatcaagaccagcctggccaacacagtgaaaccccgtctctactaaaaatacaaaaaactagccaggcgtggtggtacacgcctgtagtcccagctactcgggaggctgagggaggagaatcgcttgaacccgagaagtggaggttgcaatgtgctgagatcatgccattgtactccaacgcaggtgacagtgcgagactcggtctcaaaaaaaaaaaaataagaattgatcatggggccgggcgctgtggctcacacctgtaatcccagcactttgggaggcctaggcgggcagatcacttgaggtcaggaattcaagaccagcctggccaacatggtgaaatgccatctctactaaatatacaaaaaaattaggccaggcacagtaactcacgcctgtaatcccagcactttgggaggcaaagatgggcggatcacaaggtcaagagaccaaggccatccaggccaacatggtgaaaccctgtctctactaaaaatacaaaaattagctggacctggtggcgtgcatctgtagtcccagctactcgggaggctgaagcaggagaatcgcttgaactcaagaggcggaggttacagtgagccgagatcgcaccactgcactcaagcctggtgacagagcgagactctgtcacacaaaaataataacaataataataataataattagccaggcgtggtggcacacgcctgtaatcccagctactcagcagactgaagcaggagaattgcttgaacctgggaggtggaggctgcagtgagcggagattgtgccactgcactccagcctgggagacagagcaagactctgactcaaaaaataataataataataataaataataggccgggtgcagtggctcacgcctgtaatcctagcactttgggaggctgaagcgggcagatcacaaggtcaggagttcaagactagcctgaccaacatggtgaaaccccatctctacttaaaatactaaaattagccaggcgtggtgatgtgcgcctgtaatcccagctactcaggaggctaaggcaagagacccgcttgaacccaggaggcagatgttgcagtgagccaagatcgcaccactgcactccagcccgggcgacagaatgagactccatctcaaaaaataaaataaaataaataacaaaaataaaaccagccgggcactgtggctcacatctgtaatcccaacactttgggaggccgaggcgggcggatcatgaggtcaaagatcgacaccatcctggctaacacagtgaaaccccgtctctactaaaaatacaaaaaattagccgggcgtggtggcgggcgcctgtagtcccagctactcaggaggctgaggcaggagaatggcatgaacccgggaggcggagcttgcagtgagccgagatcgtgctgcactccagcctggacaacagagcgagactccatctcaaaaaaaaaaaaaaaaaaaaaaaaaagaactatacaaaacaaacagatgaatacttaagtcatctaaatacattagcagtaaagaccaaaaagagaaggggcagagagaaccaaatgctgatcttagtgttttacaatattgtaggacatgtgatagggcaaaacaaaacaaagcatataaaatcaccttcccccattcacgacagacaagcaggcatgagtctgcaacaatgctggctcctttctctacagttgtgcatctgtactctgacctcattaatcagactccacaaaagcccaaatttctgataaattgagcacatgatgtgtaatgctttggtgaataaaaatgtcaaaacaatttttacctttggatagtacctcggcttatgactaatgggtattcagtctaaaatcaatttttacttatttatttatttatttatttacttagaggcagagtctcactctgtcacccaggccgaagtcagtggcaaaatcatagctcactgtagcctcgaactcctgggctcaagcaatcctcctacctcagcctcccaagtagctgggactacaggcacatgccaccatgcccagctaacttttcctttctttctttttttttttttgagacgaagtcttactctgtcacccaggctggagtgcaatggcgtgatctcagctcactaaaacttccaactcctgagttcaagtgattctcctgcctcagcctcccgagtagctgggattacaggcatgtgccaccatgcctggctaatttttggttttttttttttgagacggagtctcgctctgtcgccaggctggagtacactggcgcaatctcagctcactgcaacctccaccttctgggttcaagcgattctcctgccttagcttcccgagtagctaggactacaaatgcatgctaccacgcccagttaattttttttttttttttttagtagagatggggtttcaccgtgttggccaggctggtctcgaaatcctgacgtcaggtgatccgcccacctcggcctcccaaagtgctagattacaggcgtgagccactgcacccagcctctattttttttttgtttgttcgtttttttgagatggagtctcaatctgtcgcccaggctggagtgcagtggcatgatctcagctcactgaaacttctgcctcccgggttcaagcaattctcctgcctcggcctcctgagtagctgggattaccgccacacccagctaatttttgtattttaatagagacagggttttaccatgttggtcaggctggtctcgaactcctgacctcaagtgatctgcccgcctcggccttccaaagtgctgggattacaggcgtaagccatcgtgcctggctaatttttttctattgttttgtagagatgggttcctactacagactggtctagaactcctggcctcaagtgatctgcctgcctcagtctcccaaagtgctgggattataggcataagccgccacactcagcctatatatttttaaacagagatggagcctcactacattacccagactggtctcaaactcctgggctcaagtgatttctcagcctcccaaaatacagcaattacaggcatgaaccaccgcacctagtccccagttttagtctatctgttattttattttattctgacttaagaatacactgcatattgtatgctttttattttctcaaacatatttactcccatctccttttatgagatggatggggtagttattatctgctactcgtatcctatattatacaacaggaaattgaagcagggtaaaatctagtggcattggccgtaatcactcagcttttattgacaagcataccatccaccttctctcatgggacctcactccctgccccctgtccccgccgacccaagcaagcctgaaatacattaacaaaggcaggactgcatcctcaacatatgctgagaagcagggtagagcaaccatcctccatcacggttatcagccatctactgtgagctcggcttacagcaagtccttacgtgttatctcatttgattctcaacaaaccttaagaaggcgttgggtattattactccctggtcctactgaagtaaccaagtctctcaaatttgatcacagttccacagctagtacatgcaaagccaaccttagaatccaggtgagtctggcattacaacccatgcccttaagcactcagccattatacaacactggatgatgcatctcaggacagctctgcaattccctacacacaagcgcacccccagctcctcacttacttgacggccccaacatcctccgcatagcgctgcatctcttcccgggctctctcttctcgcagctcccgctgaagctcctcaatcttcttccgctcagcctcatgcttctgctcggccttccacactttctccacattcctgagggtctgcgggtgccagctcttcttcagattctgtggtaaataaaaagaaggtgatgataattcggggggtgactgagtggtgggtataactagccctgcctcacccacccttccatacccaaggcaggcgtgtgagggcaagatgtcttcaacaatggcaaggttttcttccaataatctctcacacatctagaggggaaggggagcttgttcaagtgtataaagcttcaggacaggtcgggcgcagtggctcacacctgtaatcccagcactttgggaggcggaggcgggaagatcacttgaggtcaggagttttagaccagcctggccaacatgatgaaacgcctctactgaaaatacaaaaattagctgggcgtggtggcaggtgcgcctgtagtcccggctattcagcaggctgaggcaggagaatcgcttgaaccaagaggcggaggttgcggtgagccgaaactgcgctgctgcactacagcctgggcgacagagcaagactccgtctcaaaacaacaagaacaagaacaagaaagcttcaggatagaacgggtccttcctgaattcccttcaaacagttttaaccttaaaagcatacaagtcatccttccactagccatacctaaatcagagttggtgatgacaagacaggaggaatgcagtaatgagcaggaaggcacatattttgaaagagaacagaactcatgcacttctgacagtggacattcattcttttttttttttttttaaagtcttactctgtcacccaggctggagtgcagctatctcggctgactgcaccctccgcctcccgggtgccagcaattctcctgcctcagcctcctgagtagctggactataggcacgtgccaccatgcctggctaatttttgtattttttagtagagatggggtttcaccacattggccaggctggtctcaaacgcctgacctcatgatctgcccgcagtggcctcccaaactgctgggattacaggggtgagccaccgtgcccagccttttttgtttcttgagacggagtttcactcttcttgcctaggctggagtacaatggcaggatctcgggtcacggcaaactctgcctcctgggttcaaatgattctcctgcctcagcctcctgagtagctgggattacaggcatgcgccaccacactcggctaattttgtatttttagtagagatggggtttctctatgttggtcaggctggtctcaaactctcgacctcaggtgatccgcctgccttggcctctcaaagtgctgggattacaggcatgagctaccgtgcctggcatggacattcattctttggaactcaacctaccttagcttggtctacttcacctgccctaaacttgcatggtttacaacccacccagaatctctttcaactttccttcccaggaatctctccttggttctgatctccccattcaccctcaaagaacacttctctctctcctccccatcagatactgctttggttcactttcccaataatgaaatgttccccaaagtaagtaatatctaaagacaattgtaaactagcctggtgatgtgtgaaggggagatgaggggggtagatttccaaacagaggggaacagtacagacaagtgcagtcctggtggtgagaaagaacatagcaataattcagtgtggctggagatgtggcaagctgatggtgcagggacgcaagaagaagccaagtgagaaaggagcagaataagggccttataagccatgtaaagggattacaggcatgcgccgccacgcctggccaattttttttttttttttttgagatgtcgcccaggctggagtgcagtggcgcaatcttggctcactgcaagctccaccttccaggttcacgccattctcctgcctcagcctcctgagtagctgggactacagacatccgccaccatgcccagctaattttttttgtatttttagtagagacgggtttcaccgtgttagccatgatggtctcgatctcctgacctcatgatctgcccgccttggcctcccaaagtgctaggattacaggtgtgagccaccacacccagcctgactccaactttttttttaacttttttttttttttttttgagacgaggtcttgctctgtcacgcaggctagagtgcagtggtgcaatcttggctcactgcaacctccacctcctgggttcaagcgattctcctgcctcagcctcccaagtagctgggattacaggcgcccgccactgctcccagctaatttttgtatttttagtagagacggggtttcaccatcttggccaagctggtctcaaatcctgacctcgtgacccacccgcctctgcctcccaaagtgctgggattacaggcatgagccactgcacctggctgagactccatcttaaaaaaaaaaaaagaaaagagaatggactggagaggaccaggagaccaattaagaaaataagatcatgtccacaaggtacttggcatgtggaaaatgttcggtcaatgagagctcccttttcttccttttctcttcccctccttgtcctgcctctccccttcgtcaggtcattcagttggttggttgtgggtcagtccgtcagttggtctgaccatccgtccatccttccgtccttcctccctcactccctccctctttctccctctaacccttcccatcttgtcctccctgcctcaagcatagattattttgctccccagggagaaaatcttctggagtcatttttggctgtcacaactggtggagacgggtgttagtggatagctccagtctagtggctagaggccagtgatgctgctaaacattctacaatgcacaggacagcccaactaccaccactaccacacacccccaaagaattatctaggccaaactgtcaagagcgctaatgttgagaaaccctggattagagctttcctgtccttaaatgcagttatgtgaagaatacactaaattggatgaaactagatggagtcctggcactcactgtgattgagaacacatgacaaactaataggtttactgggcaggcggctaagctgatctacttgctggttcaattagctccactttccggaggctagcattttcccaaccttgccccatgctcttgtgggtacatttaccctatttggggccttagcgctttacaaatgaacgtttcagtttaagagacattgccacataacttatattaagtggtatgaattcaaaagcaagctctgccactacagatcagaatccagcactgaaggaggtgtggaagtcagaaagatggacaggaagatcccttcaggcttaaaaaggaccccagggccgggcgctgtggctaacccttgtaatcctagcactctgggaggccgaggcgggcggatcacttgaggtcggcagatcgagaccagcctgaccaacatggagaaaccctgtctctactaaaaatacaaaattagccgggtgtggtggcgcatgcctgtaatcccagctactcgggaggctgaggcaggagaatcgcttgaacccaggagggaaaggttgcggtcagccgagatcgcgccatggcactccagcctgggcaacaagaaactccgtctcaaaaaaataaaaaataaaaaacgaccccagggcatggcttagggtagggagaatggggcacaaaccacccctacttcagtccaggacatgactctgaactctcacccaaggaagagaggtgtgtggcaagacaagatatacaaaacaaagtgtggtgacacgtcctccatatctacctcctttcctagccatggctccatccgccccctccccggtcttcccagaatttacagccggtagagccgcagtcaacaaacacgcaaacaccacctgtcactgttcgcgacacacctcggactttcccaaatctcagtcccacccctccattgccctaaggatccatcccctcttcagggcaacggcctcctcccggcgaaagcaaagctgcgttgccatggttatccactccttcctctacccccaccccctgccaatttccgtcccggcctcagtcctcccccgcccaggcctccctccactcaccaggtctccgccccccatgacggtggagacgattcctcactacgcggatctggaagatttcgggaggatcaagagaaaacgtagagaaatagttcgggggctacctcgcgggatctagtcccaggagccgtcaactgccagtttcaccaccgctctagaggtcacttccgggagggcgtcatctcaccgcgtcggcgtcgcggaacgatgacgtacagggctcggtcgcgctttgtgacgttggcgttacttgcagattttgcaaaggtccgggctccgctgtcgaggcctttgctgtcgaggtctcattttggctgcttcgggtcgccacgttgcctgatgtcccagactctctgttgaaacgccacaactctgttcagtgatgggttgccgtgggcctgtgcccacggctgtgttgccatggcagctcaccagggcattcggctcaaagctccacgtagtctctgctagacctaaggtggaccagactaggcctcctcccctcaccctgcacacacccccacgctccagttttccaaaacggctttgcaaactggcgctttcctcagaccttgactcacagcaaatccccttatgccaggcctattttacgaagctaaatagaaaccatcaaatcgaaattccatcagcttccgtttgccaaacttttaaaatctgccagcttccacagtggcagattttcccatagtgggaagctggcagattcctttcccttcagttactatgtgtttttggcatgtttttcttttttctttttctttttcttcttctccctttgtttttgttttttgagaaggagttttgctctcccaggctgcggtcgaagctgactgcaacctccgcctcccggacagcaattctcctgcctcagcctcccaagtcgctgggattacaggcgcccgccacccgcccggctaatttttgtattttttgtagagacagggtttcaccatgttgctcaggcttgtctcgaatttcgacctcaagtgatctccccgcctcagcctcccaaagtgttgggattacagacataagccaccgcgcctggctatttttatttttgtagcaacagggttttgccatcttacccaggcttgtctcaaactcctggactcaagcaatcctcctacctcggcctcctaaagtgctgggattacaggtgtgagccactgcgcccgacctgttttgtaattttcagaatagaagttttgcacatcttttgttaaatttattctaaatgttgtattttttgtgatgctattttatttatttatttatttatttatttatttatttatttatttatttatttatttatttcgagacggaatctcactctgttgcccaggctggagtacagtggcgcaataccagctcactgcaacctccgcctcctgggttcaagcgattctcctgcctcagcctcccgagtagctgggattacaggcatacgccaccacgacctactgatttttgtgtttgtagtaaagatgggatttcaccgtgttggccaggctggtctggaacccctgacctcaggtgatccgcctaccttggcctcccaaaatgcaaggattacaggcacccggcctgtgatgctattttaaataaaatttaaaaattttaattttccaattgtttgctactaatagataagaacgtgcttttgtatagtaaccttctattttacaggcttgctaaattcacttattagttcttatggctttttaaaaatacttattgcccgggcgcggtggctcactcctgtaatcccagcactttgggaggccgaggcaggtgggtggatcacctgatgttgggagtttgagaccagcctggccaacatggaaaaaccccatcctactaaaaatacaaaaattagccgggcgtggtggcgggtgcctgtaatcccagctacttgggaggctgacacaagagaatcacttgaccctaggaggtggaggttgctgtgagccaagatggcaccactgcactatagcctgggcgacaagagtgagactttgtctcaaaaaaaacagaaagaaagaaagaaacaggctgggctcggtggctcacgcgtgtaatcccagcacttttgggaggctgaggcgggcagatcatctgaggttgggagtttgagaccagcctgaccaacatagagaaaccccgtctctactaaaaatacaaaattagccgggcgtggtggcacatgcctgtaatcccagctactctggaggctgaggcaggagaatcacttgaacccaggaggcagaggttgtggtgagccaagatagcgccattgcactccagcctgggcaacaagagcaaaactctgtctcagaaaaaaaaaaaaagaaaagaaacaaacaaaatacctattaaatatttacttaaatgtatttgaataaagtttacttaaaagaaaagcaggctcactgctgtagtcccagcactttgggaggccgaggcaggtggatcacttgagcccaggagttggagaccagcctgggtaacgtggtagaaccctgtttctcaaaaaatacaaaaattagcaggacatagtggcatgtgcctgtagtcccagctactcaggaggctgaggtgagagactgcctgagcccaggaggcagaggttgcagtgatccaagatcataccactgcactccagcctgggcaacagagcgagaccctgtttcaaaaaataaaagagggccgggcgcagtggctcacgcctgtaatcccagcactttgagaggccaagacaggtggatcacctgaggtcaggaatccaagaccagtctggccaacatggcgaaaccccgtctctactaaaaatacaaaaaaattagctgggcgtagcagtgcacgcctgtaatcccaggtacttaggaggctaggcaggagaatcgtttgaacccaggaggcagaggttgcagtgagctgagattgcaccactgtactccagcctgggtgacagagccagactccacctcaaacttaattaattaattaatttaattaaataaagaaaagcaagcagagcacagtggctcatgcctgtaatcccagcactttgggaggctgaggtaggaggactgcttgagcccaggagtttgagaccagcctgggcaacacaataagacactgtctgacaaaaaaataaaaggaagaaaaaaggaaagaaaagcaatgctttgggaaagagtctggcagttcctcaaaaggttaaacttagttaccatataacccagcatttctactcctgggtatatactcccaagagaaatgaaagcatacatcaatacaaaatattgcccatgaatggctttttattttgttttgttttgagacagagtcttgctctgtcttccaggctggagtacagtgctgtgctcttggctcactgcaaccttcaccccactggttcaagcgattatcgtgcctcagcctcccaagtagctgggattacaggcgcacaccaccacacccggttaatttttttgtatttttagtagagaggaggtttcaccatgttggccaggctggtctccaactcctgacctcaagtgatctgcccacctcggcttcccaaagtgctgggattataggtgtgagccaccacacctggccaaaatcttgtacgtgaatgttcatagtagccgttattcataccagttaaaacatgggggaggctgggcatggtgtttcatgcctgtaatcccaggactttgagaggccaagatggccagatcatttgaggccaagagttggagaccagcctggccaacattgcaaaaccctaaaaatacaaaaattactaaaagtaaaaaattagctgggtgtggtggtgcacatctgtaatcccaactattcaggaggctgagaacccaggatttggaggctgcagtaagccaagattgtactactgcactccaacctgggcaacagagtgagactctgtctcaaaaataaagtagggcagagaatcaaaacatatccattacctgatgatgatgaatagataaagtatggtatatccacacagtggaatattatttggccataaaaaaagaagtactggctacacatggtggctcatgcctgtaatccaagcactttgggaggctgaggcgggcagatcacgaggtcaggagatcgagaccatcctggctaacacagtgaaactccatttcaactaaaaatacaaaaaattagctgggcgtggtggcacatgcctgtagtcccagctacttgggaggctgaggcaggagaatcgcttgaacaggggggcggaggttgcagcgagccaagattgcaccacagcactccagcctgggtgacagagtgagactccatctccaaaaaaaaataaaaaagaagtactgttaagagctacaacatagatagactttgaaaacagtatgctaagtgaaaaaagccagtcacaaaagaccacatgtatcattccatttataggaaatttctataataggcaaatcaatagagacagaaagtagattagtggttgcctagagatgggtaggttgggaggaaataggaagttgactgccaatgggtatggagtttcagtttggtgtgatgaaattgtgctaaaattgattgtatcgatgggtgaacaactttgtgaatatactaaaaatgattgaattgtaggcttttgttggctgaattgcacggcatgtaaattatatcaataaagctattaaagagaatcagtattacttgccataaatagaatggaaactaaaaatgacttttttttttttttttgagatggggtcttgctctgtccccaggctggagtgcagtggcacgatctcagctcactgcaacctctacctcccaggttcaagcgattcccctgcctcagcctcccaagtagctgggattacaggcacgtgccaccacacccggctaattttttatattttttagtagagatggggtttcaccatgttggccaagatggtctcaatctcctgacctcatgatccgcccgcctcggcctccaaaagtgctgggattacaggcgtgagccaccgcgcccggcctaaatatgacattattaaacactaactagatacattttatttttcttgaaatgggtctcaatatgttggtcagggtctaaatatattggttaagctgatctcgattcctagactcaagtgatgctcccacttcagcctccagaggagctgggattacaggctggagccaccactgtgcctgacaggaggaattcttatttggtgccagctctctaacacttctaaatcttctaaatccaaagtgcaaggattacaggtgtgagccaccacgcctagccaatctccctctcttttattcaaagagtgtacagtgctgggcatggtggcacatacctataatcccagctacttggaaggttgaggcaggaggatcacttgagcccaggagttggaagctacagtgagccgtgattgtgccactgtagttcagcttgggtgacagagtgagagtccatctctttaaaaaaaattttttaaacgacttttttcttaagttactgaggataggaaagggaataatttttttaattctgtgattcagtgtttttgtctatctccagtcaaattgcaaatgcctgcagtacccatcccacacttgggacaaacagacacaagatgtgaagctgggcacggtgctcacacttgtagtcccagcactttcagaggctgaggtgggagaatcacttgagcccaagagttggagaccagcctgagcaacaaagcaagacctcctctctacttatgttaaaaaaaaaaaaaattagccaggtgtagtggcatatgcctgtagtcccagttgctggggaggctgaggcaggaggattacttgagcccatgagtttcaggctgcagtgagccgtggtcatgctactacactgcagcctgggtgacagagcgagaccctctctcaaaaaaaaaaaaaaaaaaagatgtaaagctgaagtacaccacccagaatgtgacatatgccccttccatttaagcaataagcaattctttttcatcttattttattttattttatttttttgagagggagtcttgctctgtcgcccagactggagtgcagtggcctgggttcacgccattctcctgcctcagcctcctgagtagctgggactacaggcatccaccaccaccacacccagctaattttttgtatttttagtagagacggggtttcaccgtgttagtcaggatggtctcaatctcctgacgtcatgatccgcctgcctcggcctcccaaagtgctggggttacaggcgtgagccaccgcgcctggcctccttttctctcttttttccttccttccttctttccttccttttctttctttctttccttccttctttctctctctttcttttctttccttccttctttccttcattttctttctctctttctttccttccttcctactttctttccttcttttctttctctctttcttctttctttcctttcttccttctttctttcttttctttctttccttccatctttctctccttttctttctttatctttccttccttctttccttttcttgctttccttcttccttccttttttccttcttttcttttttttttcttttgagatggagtctcactctgtcacccaggctggagtgcagtggcgcgatctcggctcactgcaagctccgccccccggattcatgccattctcctgcctcagcctcccaagtagctgggactacaggcacccgccaccacgcctggctaatttttttgtatttttagtagagacggggtttcaccgtgttagccaggatggtcttgatctcctgacctcatgatcagcccgccttggcttcccaaagtgttgggattacaggcgtgagccactgcttcggcctcttttttttttttttttttaggagagagagtctcactctttttgcccaggctggtgcaatctcggctcacacaatctccacctcccagattcaaacgattctggtgcctcggcctcccaagtagctagaattacaggtgcacggcaccatgcccggctaatttttatatttttagtagagacggagtttcaccatgttggtcaggctggtctcaaactcctgacctcatgatccacccacctcggactcctgaagtgctgggattacaggcgtgagccaccgcacccggcatttctctctctctctctcttttccttctctctcctttcttctgtctttccttccttcttttctttatttctctttctattcttccttccttctttctttccttcttttctttctttctctttctttccttttctctctttctttctttttttttttcccagagtctcactctgtcgcccaggctggagtgcagtggtgcgatcttggctcactgcaagctccgcctcccgggttcacgccattctcctgcctcagcctccccagtagctgggactacaggcgcccaccaccatgcccggctaattttttgtattttacgtagagacagggtttcaccgtgttagccaggatggtcttgatctcctgacctcgtgatccacccgccttggcctcccaaagtgctgggattacaggcgtgagccaccgcaccaagcctttttttttttctttcgacaaagtctcgctctgtcgcccaggctggagtgcaatggcgcgatctcagctcactgcaacctctgcgtcccaggttcaagcgattctcctgcctcagcctctcaagtagctgggattacaggcgtgcaccaccacgcccggctaattttttgtatttttagtagagacagggtttcaccatattggtcatgctggtcttgaactttttttttttttctggacagagtctcactctgttgcccaggctggagtgctatggtgcggtctcggctcactgcaaccactgcctcccgggttcaagtgattctcctgcctcagcctcccgagtagctgggattacaggtgcgtgccaccacacccggctaattttttgtatttttagtagagacgggggtttcaccatgttggccaggctggtctcgaactcctgacctcgtgattcacccgcctcggcttcccaaagcactgggattataggcgtcagccaccgcgcctggccctggcccttctttcatgttttaattcgaggcagctttgcatgtactaagttttcaaaagtacgtgcatttttatctatactctgacacacacccaattaccaaattgtgttcacagctctgtcagactcactcacagatttagaatctcctcagggacttggtcttaattgaagacaaatgaggtcccagatgggctttttgtcctaaaggtcagctggaatgtgggaggaacaatttcagcacaagagcaagttgaaagttgcttcatcttttcaggtgatactgtggctgacagtatttactgttaaatggagtggaagtgagaaaacaccacagaagggggcacctagattcgaaccggggacctcttgatctgcagtcaaatgctctatccctgagccctaccccctctacctgtaataagcttcttccgtgtccacttacggtgactcaatacaatcaagttccacccacacgagttctggcaagctttgtgttctaaagccccaccttcttaattatccatcatctgctttggcttttcccttggccaccaataaactgaaagggaacacttgaaaaatgacatcctgggccgggcaggtggctcacgcctgtaatcccagcactttgggaggccgaggtgaggtcaggagttcgagactagcctgaccaacacggtgaaaccccgcctccactaaaaatacaaaaaaattagctgggcatggtggcaggcaccagtaatcccagctactagggaagctgaggcaggagaattgcttgaaccccgggaggcagaggttgcagtgagctgagatcacactactgcactccagcctgggctaacagagtgagtctctctctccttctctctctctctctatatgcatatatatatacataaacatatatatatatacataaacatatgtgtatacacacacacacacacacacacactcacacacaaacatatatatatgtttagtaaagacagggtttcgtcgtgttgcccaggctggtctcaagtgatccacctgcctgagctcaagcaatcctcccatctcggcctcccaaagtgctgggattacaggcgtaagccacggagcctggcctttgctccgttcttttttttttttttttgagacggagtcttgctctgttgcccaggctggagtgcagtggcgcgatctcggctcactgcaagctccgcctcccgagttcacgccattctctcgcctcagcctcccgagtagctgggactacaggtgcccgccaccaagcccggctaatttttttgtatttttagtagagacggggttttagtgttagccaggatggtctcaatctcctgaccttgtgatccacctgccttggcctcccaaagtgctgagattacaggcgtgagccacagcgcccggccctttgctctgttcttgatggaaacaatagccagctctgacctggggccctgctgatagctggggaagtgctttattgaggttgagtagtgtggctccttcttatcccactggtaggggagaactgaagcccctcctttcaaacctggcactcgttggtatggagtgcaagggcgtaggcctgagaagccctttctcctctcaccttctctccagagggaagagaagctgagggtagaactggctccatcctctaatctcagggaagaaacagcacacgtggagacacaaattaatttttttaacgtaaaataacactaagagttcatctaaacatttgtcttagaaattcaggtcgatggctatgaagggaaaagatgctgttagaacagagggaagtgggtgacctctccgaagacggacgtgctctgacggagggctggagtgttcctgcggtagccaaaccttccattgaacccatcgatcggtttcagatcagcattgtagtggtcatgcccagtcacctgctggagagaatgcccttggggacaaggagagagaggcctgagcctgcattcagcccacctcttggcttccccattcccctgggtgtggtatgggatgccaaccaggcgtagtcacttgcattccccatgctgaacacgcaatccacaagtgtcctgagactctgggctgaaaagccaagggctggtgaggttgaggggcagaaggcttcctagaaataaaaccccgcaccaggaataattgcaggaaaactgtgaatggtttgtgctgggacaggaagggccagaaattctgggcttggcaaagcttgcctttctcccacaagaaatgagaaaaatctcacccttgcctctgacccatgtggaaaaaatggatgagatcaagatcaattgagccaaatggcacaaagtatcatgtgactagaggagtggcccaggatggtggagccaggctgggaggagggtttaccctgttagaaaaatatctctcaactctttcccattgttgttaacctgggcctggaaaatgagcaggatgcagcagtgaggggaacaggggcttcagagttgggaagagcagaatctttttgtttgtttgtttttgagacagagtcttgcactgtcgcccaggctggagtgcaatggcgcaatctcggatcactgcaacctctgcctcccgggttcaagagattctcctgcctcagcctcctaagtagctgggattataggtgcctgccaccacgcccggctaattttttgtatttttagtagagacggggtttcactatgttagccaggctggtctcgaactcctgacctcgtgacccgcctgcctcggcctcccaaagtgctgggattacaggcatgagccactgcaccaggccaggaagagcagactattaatcccagctcagccctcttgccaaattactttaactcaagaaacttgttttcctacctgtgccatggggttagtgtgagggtgaaaagtgcccaacaaatggctcatgtctgtaatgccagcactttgggaggctgaggccagaggatcacttgagcctaggagttcaagaccagcgtgggccacatagggagactccatctccacaaaaaataaaaaattaactgagtgtggtggtgcacacctgtgggcccaactgctcaggaggctgaggtgggaggattgcgcaagcccaggaggtcaagactgcagtgagtagtaattgtgctactgcatttctttctttctttctttctttttttttttttttttttttttgagatggagtctcgctgcatcgcccaggctggagtgcagtggcacgatcttggcacactgcaacctccgcctcccgggttcaagcagttctcctgcctcagcctcccaagtagctgggattccaggtgcgagccaccacgcctggctaattgtttttttgtatttttagtagagacagggttcaaccaggttggccaggctggtttggaactcctgacctcaagtgatccacccgcctcagctcccaaagtgctgggattacaggcgtgagccactgcacctgtccgtgctactgcatttcatgcattccagtttgggtgatagagtgagaccacgtctcaaaaaaaaaaaaaatgaggtctgacatacagtactggtgcttattaactaatattagggggcactgtggcaccatctgctcatgtatgtgaagaaaagctggaaggatgcagtccctttgcctcttcccctcaaccaggccttgctatggcccaggaaccatgatgaggctagaaatggaggcagcacttgcctgtccctgcccaatttctcctgttgaggtatctttgtccttgcccgaagatgtggatgtagtctactatccagccatcccttcctgtaccgccatgatcctgaaagtgggcaagagaaagtgggcaagaacactgtcagccacaatgctgagggggacacagtgcaaactgccctggggtttgctgtggggatagggaagaggtcagagccttaggtaactggtgcagacagattaaatatatttaagaaccagaccgggtgcagtggctcaggcctctaatcccagcactttggaaggccaaggtgggtggatcacctgaggccaggagttcgagaccagccttgccaacatggtgaaaccccatctttaccaaaaatacaaaaaattagctgggcatgatggcaggcgcctgtaatcccagctgctcaggaggctgaggcggtacaattgcttgaaccccggaggcagaagttgcagtgaaccgagatcctgccattgcactccagcctgggcaacaagagccaaactccatctaaaaaaaaaaaaaaagaaaaaaagaaaaagaaaaagaagaacctattgcctctccgggaggggcagttgagcttggcagctgaaggctcagtttctgctgccagacaggctgggttctaactccagctcaaccattaacaggctttgtgaccttgggccaattacacagcttctctgggcctcagttttcccatcggtaaaaggagtattgctgtgaggtttgttttttgagacacagtcttactctgtcacccagactggagtgcagtgttgccatctcggctcactgcaacctccgcttcctgggttcaattatcctgcctcatcctcctgagtagctgagattacaggcacgcgccaccatgcccggctaatttttgtatttttagtagagacagggttcacatattggccaggctggtctcaaactcttgaactcaagtgatccacccgcctcggcctcccaaagtgctgggattacaggattgagccactgtgcctggcttgctgtgagacttaagtgattttgttcagataaagggcctggcatagtaaagtttaataaatgttatctttatttaaatgaaaataatacctaccacaaatggtggttttgataattaaataatacttttaaaaattaaacagattggctgggagcagtgtaatcccagcactttgggaggccaaggctggaggatctcctgaggtcaagagttggagactagcctggccaacatggctaaacccggtgtctactaaaaatacaaaaattagccaggtgtagtggctcatgcctgtaatcccagctactcaggaggctgaggcaagagaattacttgaacccaggagacagaggttgaagtgagctgagatcgtgccactgcactccagcctgggcaatagggcgagactccacctcaaaaataaaataaaataaaataaaagattagctgctgggcatggtggcacacgcctatagtcccagctactcaggaggctgagactggaggattgcttgagcccagcagttcaaggctgcagtgagctgtgccactgcacttccagcctgtgtgacagagttgcactctgtctcaaaaaagaaaattagaaagcctttttcaaggccgggtgcggtggcccacgcctgtaatcccagcactttgggaggctgaggcaggtggatcacttgaggtcaggagttcgagaccagcctggccaacatagtgaaaccccgtctctactaaaaatacaaaaaactaactgggtgtggtggcgggcgcttgtaatctcagctattcaggaggccgaggcaggagaattgcttgaacttgtgaggcagaggttgcagtgagctgagatgacgccactgcactccagcctggatgacagagtgagactctgtctcaaaaaaaaaaaaaaaaaaaaaggaaagaaagaaagcattttcaaaatatgtataccctatcattttcaaccttttaaatactcaagttcttccttttcccctccccagactctggttccttctgtcgtaaaattacgagtcgatgccagcatggtggctcatgcctatagtcccagcactttgggaggccgagatgggcagaacacttgagctcaggagtttaagaccagcctgggcaacatggtgaaaccctgtctctgtagtctcagctactagagtggctgaagtgggaggatcgcttgaacacggaaagcagaggttgcagtaagccaaaattatgccactgcactccagccagggtgacagaacaagaccctgtctcaaaaaaaaaaaaaaagaaaagaaaagaaaagaaaaattgggccgggcacggtggctcacacctgtatcccagcacttttggaggccgaggcaggcagatcacaaggtcaggagttcgagaacaccctggctaacacagtgaaaccccgtctctactattttttgtaaaaatacaaaaaattagacgggcgggcgtggtggcgggcacctgtagtcccagctacttgggaggctgaagcaggagaatggcgtgaacccaggaggcagagcttgcagtgagccgagatcctgccactgcactccagcctgggcgacagagcgagactccgtctcaaaaaaaaattaaaaaaaaaattacatgagtcaacacatgtgtgactcatgtatgtccatatacatgcactgcacagacctatgcaaacaaacatttgggactatacacacacacacaaatcccgaagatttgctcacagaataaccccatgagtcttcctgtctcttccccacaccgcttatacgtagaaacacaaatactggaagcaaaatgttgggggaaaaattgaaccatcagcaaacagtctcggaatctttgatctggggggttggtggaggagaactctgctgggaaggggcctacacctaggagggaaaaggccagggggaggaactgaggtccgcagaggtttgagaggtgtccctcccatcagaccaaagaacccggagagcaagccccatgccctgccactatgatgtcacaggaggaaggcgtctcgccctgcaggtcaaatcaattccctttgtcttgctcactgaggtcacacggatttttgcgtatttagagaatttgcggtgtgaggtcaccctagagggcgggtctgtgacgtcacaaaagacaaagacaccgactggtttgggagaagctggctttgagccctatccccttgccttgcagaaacctggaatgagtctattctcaaattcagggctggaaggccattctgtgagctcagggagcttgcgctcaacacctgtcctccctttcctccagtcctcgggctgcgttaagaaaactgggaggcggtggcgggaggatagcgtgagcccaggagttcaagaccagtctgggtaacatggcgagaccccctctctacaaaaaaaaaaaaaaaaaaaaaaaaaaaaaaaaaaaaaaattagcccggcgtgatggcgcgagcctgtagtcccggctaatcgcgaggctgaggtgggaaggttgcttgaccctgggaggtggaagctgcagtgagccgtgatggcaccaccgcactccagcctgggcgagaatcagaccctataattacaggctcacacctgtaacatggcgaaaccccgtctctaccaaaaatataaaaattagtctggcgtggtggcgcgcctgtaaccccagctactcgggaggctgaggcaggagaatcgcttgaacccgggaggctgaggcaggagaatcgcttgaacccgggaggcggaggttgcagtgagccaagatggtgccactcactacgctccagcctgggcgacagagcgagactttgtctcaaaataataataataaataaaaatttaaaaaagaaaagaaagtaaaccgaggaggtgaaagtggcggagccttctttgtggtgagaacgctggagtgaagatttagggaggtgtgtggggtcttccgggaagctcctatacctgatcagttttccgcaaaaggggcggaaccacgtgactctggaagtagctgcgggcgtggtagtcctgctgcgcgttgtagggcggaatcgccgaccacagcttgggcctagagcgcccataagcgcgggcagcggtgctcacagccaccccgtccaagataaagcctttctccagtcgcaggcgacactcgctcaggtacgccatcccaaccaccgtagcctcggagggcctttctggtgggggatgaggaccctagatggggacacccctgcgcattcttacgtgatgtcaacgacccctgcgacacaaaccctattgtctccactcaccccgggttgaccggtgggcccttaaggccgtgggggaagttgcttgcttggccccagaggaggttgaccagactgactatgcaagaggagttggaaagtgaaggggaggagactggataaccgattgtgggcagtttgtgtgcatttaggccccgctcccccagttttcctttaaggtgagtattctcttttcccacggtattacatgctatttcctcagctcagttttgttgaaaagcttgtacccggaattgatcagaaagttcagatcgcacctacttccaattctcattttacagagctagaagttgaagcttagaaagtttccctaggccgggcgcgttggcttacgccagtaatcccagcattttgggaaaacgaggcgggggggatcgcttgggcccaggaattcaagaccagcctgggcaataaagcgaaagtccatctctactaaataaatgaatacttagccgagtgtggtggcgcgcacctgtggactcagctgcactgcaggctgggccatggaggtggaggctgcagtgagccatgattgtgccacactcctggatgagagaaggaggccctgtctcaaaagacaaaaaaaaaaaaaaaaaaaaaaaaaaaaaaaaaggccgggcgcggtggctcacgcctgtaatcccagcactttgggaggccgaggcaggcggatcacgaggtcaggagatcgagaccatcctggctaacacagtgaaaccctgtctctactaaaaatacaaaaaattagccgggcgtggtggcggacgcctgtagtcccagcaactcggaaggctgaggcaggagaatggcgtgaacccgggaggcggagcttgcagtgagccgagatcgcaccactgcactccagcctgggcgacagagcaagactacgtctcaaaaaaaaagaggttccccaaatccagttagctgacttccggtcagtccacttaacaattctcctgccccacccgaattaacattatttatttacttattctttttatttatttatttattttagagacaaagtctcgctctgttgcccaggttgtagtgcagtggctcaatcctggctcactgcaacctgtgcctcccggcttcaagcaattctctgcctcagcctcccaagtagctgggattacaggcacctgccaccacgcccggctaattttttgtatttttagtagagccggggtttcaccatcttggccaggctggtcttgaactcctgatctcgtgatccacccctctcagcttcccaaagtgctgggattacaggcgtgagccaccgcgcccagcctttcacttattctatctatctatctatctgtctgtctgtccgtctatctatctatctatctatctatctatctatctatctatctatctatctatttagagagggagtctcgctctgttgcccaggccggagtgcagcggcgcgatcttggctcactgcaacctccgcctcccaggttcaagtgattattccgcctgagccttccgagtagctgagattacaggcgcctgacactaagcccggctaattttggtatttttagtagaaacggggttttgccatgttggccaagctggtctcgaactcctgacctcaaattatcagcccacctcggcctcccaaagtgctgggattacaggcataagccactgtgtctggcctattatatatattttaatataaatataaaatgtatattttatatttaaatattttatatttatattaaaaatatatatatatattttttaggtgtcacccaggctggagtgcagtggtgcgatcttggctcactgaaacctctgcctcccgggttcaatctattctcctgtgtcagcatcctgaatagctgagattacatgcccgtgtcaccaccccagactaaatttttttttttttttgaaatggagtctcactgtgtcacccaggctggagtgcagtggcaggatctcagctcactgcagcctcccaggttcaagcgattctcctgcctcagcttcctgagtagctggaatcacacgcgcacgccaccacacctggctaatttttgtattttcagtagagccggggtttcaccatgttggccaggctggtctcgaactcctgatctcaggtgatccacctgcctcggcctaccaaagtgctgggattactggcgtgagccatcctgccccgccacccagctaatttttttttttttttttttgagacagggattcactcttgttgcccaggctggagtgcaatggcgcgatctcggctcaccgcaacctccgcctcccaggttcaagcgattctcctgcctcagcctccctagtagctgggattacaggcatgtgccaccacacccggctaattttgtatttttagtagagatggggtttctccatgttggtcaggctggtctcgaactcctgacctcaggtggtctgcccgcctcagcctcccaaagtgctgggattacaggcatgagcgaccatgcccggccattaatttttgtatttttattattattattattttttttgagatggagtcttgctctattgcccaggccggagtgcagtggtgtgatcttggctcactgcaacctctgcctcctgggtttacaggtgcacgccaccacgcctagctaatttttatatttttctagatacagggttttgccaggctggtcttgaactcctgacctcaggtgatttgcctgcctcggtctctgaaagtgctgggattacaggcgtgagtaatttttgtctttttagtacagatggagtttcaccatgttggccaggctggtctcaaaattctgacctctagtgatcctctcgccttggcctcttgccaaagtgctgggattacaggtgtgagtcaccatgcccagccccacccgagttattttcacccgctattatttatgcttgtttttttcccctcgagacatggtttcactccaatttcccaggctggcatgcagcgttgcgatccggaatcactgcaacctctgcctcccggactcaagcgattcttctgcctcagcctccaattagctgggattacaggcacacgccaccaggcccagctaattttcgtattttttgtagagacagggtttcgctgtgttggccagactggttttgaactcctgagctcaagtgatcagcccaccttggcctcccaagctgggaggattagagccatgagccaccaggactggccttatctttcctttaaaataacaaaacggtggggggacacattaccatatttttcctccagctaattttctttttctttttcctttagtttccacatacagcattggatctaggtaattatataaattacatattttattattttatttatttctgagacagtgtcgctctgtcgcgcaggctgcagtgcagtggagcgatctaggctcactgcagccaccgcgtcctgggttgaagccattctcctgcctcagcccagagtagctgggagtacagatacacacaaccacacccagctaattttttttgtagagacggaggtgttttttttgtttgtttgttttttgggtttttttttttttttttttttttgagacagagtctcgctgtgtcgcccaggctggagtgcaattgcgcgatctcggctcactgcaacctccacctcccgggttcaagtgattcttctgtctcagtctcccgagtagctggagttacaggcacctgccaccactcccagctgattttttaattttttttgagacagagtctcgctctgttgcccaggctggagtgcagtggtgcgatctcggctcactgcaagctccgcctcccgggttaacgccattctcctgcctcagcctccccagtagctgggactacaggcgcccgccaccacgcccagccaatattttgtattttgtttagtacagacagggtttcattgtgttagctaggatggtctcgatctcttgacctcgtgatccgcccgccttggcgtcccaaagtgctgggattacaggcatgagccaccgcgcctggcctaatttttatatttttagtagagacggggtttcaccattctggccgggctggtcttaaactcctgacctcgtgatccgcccatctcagcctcccaaagtgctgggattacaggcgtgagccaccatgcccggccttgttttttttttgttgttgttttttgtttttgttttttctttgagatggagtttcactcttcttgcccaggctggagtgcaatggcacgatcttggctcactgcaacctctgcctcctgggttcaagcgattctcttgcctcagcctcccaagtagctgggattacaggcatgtaccaccacagccagctgattttgtactgttagtacagacagggtttcaccatgttgatcaggctggtcttgaactcctgacctcaggtgatctacccgcctcgacctcccaaagtgctgggattacaggcgtgagccaccacggccgttgttttgttttttgagacagagtctggctattgtcgcccaggctggagtgcaatggtgcgattttggctcactgcaacctccacctcctgggttcaagtgattctcctgcctcagcctcctgagtagctgggattacaggcgcccatcaccacacccagctaatttttgtatttttagtagagacgcgtgtttcgccacattggccaggttgatctggaactcctgacctcaggtaatccacctgccttggcctctcaaagtgttgggattacagccgtgagcctccgcacccagccgagatggaggtttttttaattttttttgagacggagtctcactctgtcgcccaggatggagtgcagtggcacgatcttggttcactgaaagctccgcctcccggtttcacgccattctcctgcctcagtctcctgaatagctgggactacaggtgcccgtcaccatgcctggctaattttttttgtatttttagtagagacggggtttcaccgttagccaggatggtcttgatctcctgacctcatgatctgcctgcctcggcctcccaaagtgctgggattacaggcgtgagccactgtaactggcctgttttgtttttttcatagagacagtcttgcccaggctggagtgcagtagtgtgatcattgctcactgtagccttgacctcctggcctcaagtgatcctcccacttcagcctccagagtagctgagactaaaggtacacaccaccacacccggccaatttttgcgtgcctgtagctagacttcagaattgctcatctcagcctccagagtagccgggataataggcatgctccactaggtcttgtagtgaatttactatttttttatatttactactatttttattatgaaagtacatgtattactgttcaagttgcaagctactataaatcagatctgatatcttgaatccattctattaaaacttttacctagaaagaacttgcagaatataaacagtgacaaaggaaacaatatatatatatatatatctggccgggcgcagtggctcacacgtgtaatctcagtacttcgggaggccgaggggggcggatcacctgaggtcgggaggtggagaccagcctgaccaacatggagaaactcggtctctactaaaaatacacaattagccaggcgtggtggtgcatgcctgtaatcccagctactcaggaggctgaggcagaagaatcacttgaacccgggaggcggaggttgcagtgagccgagatcacaccattgcactccagcctgggcacaagagcgaaactcggtctcaaaataaaaaaatgctaaaaaaaaaaaaaaaaaaaaaaaaaaaaaagatacaaaaatcagcctagcgtggtggcgggcacctgtagtcacaggtactcgggaggctgaggcaggagaatcgctagaacccaggaggcagaggttgcagtgagctgagattgcaccactgcactcaagcctgggcaacaagagcccaggagtctcttggagcccaggagtgagatggagtctccctggctcactgcaacttccgccactgcaacccctgcctcttgggttcaagcaattctcctgcctcagcctgcggagtaattgggactacaggcacgcgtcaccacgcccagctaattttgtatttttagtagagacgagatttcaccatgttggccaggctggtcttgaactcctcacctcaggtgatcagcccatctcggcctcccaaagtgctgggattacaggtgtgagccaccatgcccagctgacaaaggaaaacatttagtgaagtgtaaatataaagttttttaatccaagtcaaaaaaaatctccaaagaataaaatgtgaggtgggatgcagtggctcacacttgtaattgcagccctttgaaggccacagcaggaggattccaagtccagcagttcaaagttacagtgagcttcagtggtgttactgcactccagcctgtgtgacagagcaagactgcctcagaaaagataacattcaaaaacagcagcgattagtggttaatatataaggatcatatattgccataatatataaagacataaatggtgggcctaggggcttgtcacactaaagctgacttgaaattgaccatactcagggatgttatggtgtaactctctaaaactagagatttaatacattttttttctttccccccagagtttcactggttgcccaggctggagcacaatcgtgcgacctcagctcactgcaacctccatctccggggttcaagcaattctcctgcctcagcctcccaagtagctgggattacagcatgcaccaccatgcctggctaattttgtatagtagagatggggtttcaacatgttggacaggctggtctcactctcctgacctcagatgatccacccacctcagcctcccaaagtgctgggattataggtgtgagccaccgtacccaggcgagatttaatacttctaaaaccaagcctggttcagtctagacagggtactggttctcagtcttgggtataccttgacatctcctgggagcttcacaattctgatgtctgagtcctattctgcagtctgacttaattggtctagggtatggaccggaaacattttcaaaagctccaggttagaacaactcctctctaggtctggtacattccataactagtcatggaagacactaagggtagtcctttttgataccaagtggagcttgtattatacccaacttacaggtagaaacatttatggctgagtatttgcagatacagatacataaacacaaaccttaatctaaaaaccctgtttagtccacttccctccaaattattgttctaaacaaacacccatttttccaaaacgctgggtgtcacctaaataaactcttacacgtttagaaagaaatgctaacaacctcctaccttaaggccaagtcccttattatcagcgctttatgcctgttcagttggcaaaaatttaccacattcttccattctcaaactagagcttggaacataaattacacgatcatcctgtttgtcaaaacattttcatagcaaaatacctgtaggtaccatcaacttaatcatcttccactatgacagtaaacctacatggcaattactgttgttttataaatattcaatttactccaaatctgttaactgctaaaatgtacatacataaacaaactcacatcattcctcaaaatccatgtgtgtgtccaggatctaactatatagtctatcttaacttcaatgcctttttttggggcgggggcgggaacggaatcttgctccgttgcccaggctggatggagtacaatggtgcaatctcgactcgctgcaaactccacctcccaggttcaagcgattctctcagtagctgagattacaggcggtgcgccaccacgcccagctaatttttgtatttttagaaaagaggaggtttcaccacgttggtcagcctggtcttgaactcctgacctcatgatctgcctgccttggcctccgaaagtgttgggattacaggtgccagctaccgcgcccagccatttgaatgccttcctcactccaggagaagctaccatgtatagccagtcattgagcagtatctactattatttttgggactcaaaacccaaataatactttttgaggccaaaattgtaaatacagcaattggaagatgctgaaagtctgcaaactcacaaaaaagcaaggattgctttaaaaaaaaaatgcccagagtttccatttcagaaaagtgatggtcagggtatgtcaaaaacactgtagaggcctgggtgggcagatcacttgagatcaggagtttgagtcgtttggcaaacatggtgaaaccctgtctccaccaaaaatacaaaaactagccaggcatgacggcaggtgcctgtaatcccagctacttaggaggctgaggcaggagaatcgcttgaaccctggaagtgaacagggagacaagcactgcaaacaaatactttttaatgggtttagtttttttttttattttttacaaatatactggagaatcatgcaatgctgccagcattggatgcaatccggggccacaagtctgcacactcctttgctactggtcctgtaatggcagaacctgcattaaaaaaataaaataaaataaaataaaaacatgtgggggacagattaagacatcgtcaaacacagaagatccttggcctgtacttctagacaatccacccaacctcagagacctaaggaacaagctggactgatttcctacctttcatctcgcctttattgttcactatgactcctgcattatcttcaaaataaagaaacacgccatcttttctacggtatgactttcgttgtcgaatgaccactgctggatgtactgagagaagaaaaaaggacagcagtcattaacctgtcaagtcgcagtgccaccacaaaagcagtttccaactagacagaatgtacactcagcgtttgagacagtgacagtgtaaatatcaatcttcaaggtgatcctcccacctcagcctctctagtatcttggactacaggtgcacactaccatgcccagatttttttttttttttcatagagacagggttttgccatgttggcaagcctggcctcccaaagtgctgggagtatagggagtaaaggcatgaaccacgatcatctattcacatcttaaaatcaaagctgccagtattttctcacaagtgtaaaactctcaggacaactatccttgcctatgccttttccaacttcaccttacaggtaggttattaagatcccagtatcactgaattgggatgtagaaatgggacctgggacccccaactcctcccagtcctggcaatgagcagagaccaagctattcagatttacactggaaaacagtttgaattcctgggcccaagcaccaggctttgttttacttttaatgaactgttttctagtgtcctaagtaacttttatacccatctgtactaaagtgaaaaagacgcttttcccaactttcaaaatgaagtatcactacacagtgaaatataatgcttgtgaagaactattgtagagtcagacacacctggattcacaatcttcactgatactagcatggggtccttacacagaatttttatgacaggaagactacacaaaaaatagataagtctaaccaagttagtaatgggacacacatgaggtagccaatacttactgactgaccctcctctactcataaaccatttaatcctcacaaattcttcaagtagacctggtccttttgcatatttctgtgcttgttatttattgatattaagttccaaggggaggggatgtattcatttagcagaaacaaggaccaaaaaagacattaacagaattggaaactcacaactagttttaaaactgaagtgttcggagctctggtctgtcccaccactgactgagaccaacaatccaccctcctgccatctcatctacaaagtgaaggccatttgctctgctcttctctgacagctccctgggccaccaatcagacccaggaagtgttctgagaagaggaaaaagcccatgcaattgctgaatcacaatcacagtgctacccagccctcaaatggatattaatggtgaacaaaaaacaatttctaacccaaaggctaaaaatctactggacagcatcgtggggtggatacaggaataggagtaactgtaatacagggctgacaaatcaacatcacatttgtaaatcaagggatggccaggaactctttagaagagcaagacatcccagggtagagacagattaggcaggcacaggaaaaaagtgcaagcgctgaagttaaaatgcaccaaacaccagaagttctaaagccagacaggacacaagctgcaagtattttgaggcctccccctttaaatcatacacctgacaggaaaaattttgagtggggagcctgagattaagtaatgagcaattagccgggtgtggtggtgcacacctatgatcccagctactcgggaggctgaggcaggacaatctcttgagcccgggaggtggaggttgcagtgaacagatatgtgccactgcactccagcctgggcaacaagtgagactccatctcaaaaacaaataataaaataagcaacgggcagcttgttttcgttttgtaatatatttttttttgagagcccaggaggcggaggttgcagtgagccaagatcgtgccattgcactccagtatgggctgggcgacagagagagactccatctcaaaaaacaaaacaaaacaaaacaaaaacaacaacaaaaaaacaactaaggtatggaagtgacaagatgatggtcccccctccaacacaatatgagcaaaaacttaagatacttatctcacactgcctctcaatggaaaacaaacttgaggccttgaaaactgatccattttccaataaaggaaagcgtccccccactactcatcagtattaaggtgggctcagtgtttactcacccttttttctgagctctggtttgcctttcttgactgtggccatcaccatgtcacccacaccagcagcgggaagtctgttcagccgtcccttgatccccttcacggagatgatatacaggtttttggctcctacaaaagaatgtaaataaaaataaaaaatgttgagggccatcaggccgttccatcagtataacatttcccaaacacttccaaagcccctccctccactcactgcccaagcagttagtccgcaagaacgccttgtcacaccaccgattgaagcaaacaacacatgttgccacttcacccaaaagcgatgttttcactctcccctttcttgacggctcaataggtcattagccacaggcccattgagtgcttttaaaagggggagtatagcaacgtgcaaagacctcacctgtgttgtcagcacaattgattacagctcctaccggaagacccaaggaaatccggaatttcgcaccagaggacccaccacgtcctgtggatataaagggaagggaaacaggataaagagatcacaatctagacatggttcggagttccccctcatactcaagctgtaattcaccgcacatgctttgatagactgtacgctatagattagctcgctcggattttacttatgccgtccccatgtgccacccgattctcacggaaagtagcctatttcttactattaacactctgacatcgaaattaagaaacctagacgactcaacccttgctctaactttcgcaaaacgcaattactcctgcaaggcataaaaccgcagaggtcgcgcaaaccagggcctaatccagtctaacttcaaccccattacgatagccctattcgcggagcgatctcgcggtatccagactacattcacgtcgggatcctgccatctcaactctccagcaccccactgccactttcgagggccctggcagtgctctcgcggtggcctggctctctctctccggcctgaaggagagcaaagcgccccagctgcctagggccaccgctcctgacgaatccgccagccactgcacgacagatggtggaggatcctccagaaacaaaacctcacctcgcttcgacatcttgaacgccggaaaaaagaaaaaaggaagtcgattcaaaggacactgggatatgaactttaacgccccgcccaccctcctcacgtggccggagcaaaaaccggcctcttccgcctctgggcgctgccttattacgtaataagtttacgacgtcgcttttagccctctctgcgaagtgggagttgaggtagaagcgcaagagataggaagtatcttctctacgagcttaagagtagttagggacatggaaacagtgatttgttaacttgctcacgacctcttttgaccacttaatagtgccaggcacttatctgcacactagagaataggaattaaaacacggtttgtgccgtgtgggggttccccaaggaacaaagaaagtgggggagggagggagaacaagctctaaacggtttcgttgaatgtaatacagttgagaagtgctgcagatcattccatctatgtgttcttggtatcataccattctgtattttacatatacagtattgctctatttattgacccgtcccccccaacacacactctttttttctttttttgagaccgagtctcactctgtcgcccaggctggagtatagtggcgagatctcagctcactgcaacctccgtcttccgggttcaagcaattctctgtctcagcctcagagtacctgagaccacaggcgcccgccacaacgctgggctaatttttgtatttttagtagagacggggtttcgccatgttattggccaggctggtctcgaacttctgatctcaagtgatctgcccgccttggtccctcaaagtgctgggattacaggcgtgagcccccgcgccaggcctaattgctcctttcacagcttcagccgccccttattctctgggttctttccttcccacgatacattaattcacatacttattgagctcctactttacagcaggttctgtccagggcgtacagcggattacatcagagaacaaaatagatcaacattcttttccttatggagcttacattctgctggggtgcaggtggaggaggatattagacactaaacaaaagatataataagtaattgcagtatgtagtatgttagatggggatatgtattataaaaatataaatagtatcgcttctcggccttttggccaagatcaagtgtaaaatataaatagtggccgggccttgtggctcacgcttgtaatcccagcactttgggaggccgaggcgggtggatcacgaggtcaggagatcgagactagcctggccaacacagggaaactccgtctctactaaaaatacaaaaattagctgggcgtggtggcgggcgcctgtaatcccagctactccggaggctgaggcaggagaatcgcttgaacccagaaggcagaggcggcagtgagccgagatcgcgctactgcactccagcctgggcgacagagctagactccgtctcaaaaatgtatatagataaatagctctttgaggaagacgcggtcgtaggtgttgcggatcgctgatccgcacgctcctgctactgactcaccgctgttcgccctcgccgaggaaccagtcgctcaggaagccgcgcagcagccatggcttttaaggataccggaaaaacacccagggaggcggaggtggcaattcacgaattcgagtcactctaacgagccgcatcgtaaaatccctggagaaggtgtgtgctgacttgatcagaggagcaaaggaaaataatctcaaagtgaaaggaccagttcgaatgcctgccaagactttgagaatcacttcaagaaaaactttgtggtgaaggttctaagacatgggatcatttccagatgagaatccacaagtgactcattgacttgcacagtccttctgagattgttaagcagattacttccatcagtattgagccaggagttgaggtggaagtcaccattgcagatgcttaagtcaactattttaataaattgattaccagtttttttttctttttcttttctttcttttctttctttctttcttttttttttttgagacggagtttcgctcttgttgcccaggctggagtgcagtggcgcgatcttggctcaccgcaacctccacggccgatatctatctatctatctctatctatctctctctctctctctatctctatagagatatatatctatagagatagatagagatatatctatctctatgtatttatctatattaaaaacaactggtaatcggccgggcgcgctggctcacgcctgtaatcccagcactttgggaggccaaggcgggcagatcacctgaggtcaggagttcgagaccaacctggccaaaatggtgaaacctcgtttctacaacaatacaaacattagccaggcgcagtggttcacgcctgtaatcccagcgccttgggaggccgaggcggtcggatcacctgaggtcgggagtttgagaccagcctgacgaccaacttggagaaaccccatctctactaaaaatacaaaattagctgggcgtggtggcacatgcctgtaatcccagctactcaggaggctgaggcaggagaatctcttgaaacccgggaggtggaggtttcagtgagctgagattgcaccattgcactccagcctgggcaacaagagcgtttgaaactctgtctcaaaaaaaaaaaaacaaaacaaaacaaaaatggggccaggtgtggtggctcatgcctgtaattccatcactttgggaggccaaggtgggtgtattacttgaggtcaggagtcagagaccagcttgccctaaatagcaaaactctgtctctactaaaaatacaaaaattagcaaggcatggtggctcatgccggtaattctagcactttgggaggccgaggctggtagactgcctcagctcaggagctgaagacccagcccaagcaacatggcgaaaccctgtctctactaaaaatacaaaaaattagccaggcgtggtgcgtgcctgcagtccccagctactcgggaggctgaggcacgagaatcactggaacccaggaggtggaggttgcagtgagccgagatcgcgccagtgcactctagcctgggtgacagagcaagattccgtctcaaaaaaaaaaaaaaaaagatattgacatgaaaccaggcacagtggctcacatctataatcccgaaacaatttgggaggttgaagcaggaggatcccttgagcccaggagtctgagacctgcctgggcaacatagggagagtccatctctacaaaacatttaaaaattagctggtggcggctgggtacagtggctcatgcctgtaatcccagcactttgggaggctgaggcaggcagatcatctgaggtcagaaatttgagaccagcctgcccgtcatggtgaaaccccatctctactaaaaatacaaaaatcagctgggcatggtggtgggcaacctgtaatcccaagtacccaggaatctgagacaggagaattgtttgaagccgggaggcggaggttgcagtgagcccagattgcgccactgcactccagcctgagcaacagagcgagactctgtcttaaaataaaataaaataaaataagctggtggcatgggaatctgaggcaggagaatcacttaaacccaggaattggggactgcagtgagccgtgattgcaccactgcactccaacctgggctacagagagaaaccctttgtcattttccaataaaaagccctaaggcaggggtgtgactgaaccgaatgagcaccagcaaggaagccagatgtgactggacaggacgagtaaagagcaaagtagtaagaaatgcagtcagaagtaatggaacggtggctcacacctgtaatcccagcactttaggaggccaaggcaggtgataacctgaggtcaggagttcaagaccagcctggccaacatggtgaaaccctgtctctacaaaaatacaaaaattaaccatgcatgatggcaggtgcctgtaatcccagctacttggtgggttgaggtgggagaatcatgtgaacctgggaggcagaggttgcagtgagccgagatcacaccattgcactccagcctaggtgacagagcgagagttctgtctcaaaaaaaggaagtcatggaatgaaaccactgtggactttggcattggctgagtgaaatgaggaaacattctttgattttaagcagaggagggacatgatttgactaatgtgtcagaaggatcactgtggttgagttgttgagactacactgtgggagaggacacagggatagaagtaagaagatccattaggaagctattgcagtaacccaggagagaaatgatggtggtttggactagaatggtagtagtggatgtaatgtagtcagattctggatgtgttttggaggtagagccaataaaatgtggggtatgaaagataggaatcaaaatgtctccaagtctttaggcctgagcaattggaagatatcattgccgtcaaccaagatggagaaggctatggttataggaggaatagtgttcctggttggtactaccaccagtgtctcaaccaaaaaacagggacacaattaattctcttctcccaggctcctagaagtagtcaccaaggtctatcaacttgactctgtttcctaaatttttctgcccatgccttccacgttctgcctttgtttcaaagctattgcatcggcctctatatggtcagaccataatttcccactgcttaaaatcatgtgctggccaggcatggtggctcacacctgtaatcccagcactttgggaggccgaggcaggcagatcacccgaggccaggagtttgagaccagcctggccaacatggtgaaaccctgtctctaataaaaatacaaaaattagtcaggggtgatggcacgcacctgtgatcccaggtattcaggaggctaagcagaagaattgcttgaacccaggaggcagagttgcagtgagccgaggttgccccaccgcactccagcctgggcatgcagtgagactccatctcaaggaaaaaaaaaaaaaaaaaaaacaagaaaacaaaacaaaaaacatgtaccgaccctctggtacttatagaatacagtccaagctgtttaagcatcgaagtcacttgaaatggcctacctcttccctggctccatcttctgccaccttgcctcttatatttcacacaccagaaacaccaaaccagttaggatttctggacatatagcttagattcacactttcttgtatttatgcattcacctgctttagccactatgtgttatttatttatttatttattttgagacagagtttcactcttgttgcccaggctggggtgtaatggcaccatctcagctcactgcaacctttgcctccaggattcaagtgattctcctgcttcggcctcccaagtagctggaattacaggtgtacaccaccatggccagctaatttttttttttttttgtatttttagtagagatggggattttaccatgttggtcaggctagtctcgaactcctgacctcaaatgatccacctgcctcagcctcccaaagtgctaggattacaggtgtgagccaccatgcccgtccaacctgttctttaaaactctgctcaggtatcatttcttctctgagccgtttcacaaccccagcagtttattctctgagccacttctttactaggagctgtggttctcaaatattttcattttagacccctttacactcttttttttttttttttttttttaagacagaatctcactctgtcacccaggctggagtgcagtgggaccatgttggctcactgcaacctccatctcctgggttcaagcaattctcctgccttagcctcctgagtagctaggattacaggcgcccactaccacgcccggctaatttttttatatttttagtagagacggggtttcaccatgttggctagtctggtctcaaattcctgaactcaggtgatccatccgcctcggcctcccaaagtgctgggattacaggcgtgagccactgtgcccggccctttttttttttttgagacgaagttttgctcttgttgcccaggctggagtgcaatggtgtgatctcagctcaatgcaacctctgcttcccgggttcaagcgattctcctgcctcagcctcccgagtagctgggattacagacatgcggcacctcgcttggctaattttgtatttttgttagagatgaggtttttccatgttggtcagggttgtctctaactcctgacctcaggtgatcagcccacctcggcctcccaaagtgctgggattacaggcatgagcctccttgcccagcctcctttacactcctaaattattaaagacctcaaggagtttttgttcatataggttatatctgatgacatttaccatattataaattaaagttaagaaagttattacttcacgtaaaataacaataaacccattttttgctaaagtaaataacattttagaatgaggaataggtcaagtttggtggctcaggcctgtaatcccagcgggaggatcacttgtcctcaggagtttgagaccagcctggacaacaaagtgagatcctatttctacaaaatatcaaaaaattagctaggtgtggtggcgtgagcctatggtcctaactacacaggaggcggaagcaggaagatcacttgagcctgggaggttgaggctacagtgagccatgattgcgccactgcactccaacctgggcaacagagaccctgtctcaaatataaaataaaataaaataaataaatgtaactatatttttccaaacaaaaataatttagtgagaagggtgactttgctttacttatttttttttaaatccctttaatacctggcttgatgaaagaactggtttttcatgtttttacactaatctgttgtgatttcacacatttaatctctggaaatctccactgtattctcatgaaagagcaagagtaagacagaaaaaaaatgacattattattaaaataattctttcctctgcacagaaagggtctcactaatattatcaagaaaataggccaggcgtggtggctcacgcctgtaatcccagcactttgggaggccgaggcgggcggatcacgaggtcaggagatcgagaccatcctggctaacacagtgaaaccccagtctctactaaaaaatacgaaaaattagccgggcgtgatggcgggcgcctgtagtcccagctactcgggaggctgaggcaggagaatggcgtgaacctgggaggcggagcttgcagtgagccaagacgccaagacggcgccactgcactccagcctgggtgacaaagtgagactccatctcaaaaataataataattattattattattctggctgggcgcgggggctcacgcctgttatcccagcgctttgggaggccgaggcgggtggatcacctgaggtcaggagttcgagaccagcctgaccaacatggagaaaccctgtttctactaaaaatacaaaaattagccgagtgaggtgccgcatgcctgtaatcccagctactcgggagactgaggcagaagaatcagttgaacctgggaggcagagtttgcagtgagctgagatcaagccattgcattccagcttgggcgacagagcgagactaccttaaaaaaaaaaatcctttcttgcacgcagaaagggcctaaaggacacccaggatccccacatcacacttacaactaccagggattcagagaacactccaaagttgcagataacacatcctcctataacttaccagtttgtatgttgatatactttgtagaaggtgaagtctatgaaggtgaaaagggggtaatacgtagtttattattttcccagtatccaccacagaatgctccgagagctttatctttcttgcccgtcactgtgttaaaacggtggctgtgagggggcacccggatttgaaccggggacttcttgatctgcagtcaaatgctctacccctgagctataccccctctaccaaaaaaaggaagactgcgtcttaaatgtagtgttttctgatcagacattgcctgcagtgattcagaatagtttggtgtctatgataaactatttagagtgatctggacccaagtaaagtggtgggagagaaaagagaagtctaagtcctctctgattctggcttgagggtcttgtacggatgtgcagtgggatccctcttttccatcactatagcgcccccttttttttccactacagccttttttacctctggcatctgggaattctcttattttattatttatttttattatttttttgagatggagtctcgctctgttgcccaggctgcagtgcagtggcgccatcttggctcactgcaagctccgcctcccgggttcacgccattctcctgcctcagcctcccgagtagctgggactacaggaacccgccaccacaccgggctaatttttatatttttagtagtgacgtgggtttcaccatgttggtcaggctggtctcgaactcctgacctcaggatctgcccacctccgcctcccaaagtgttgggattacagccgtgagccaccgcgtccggctgcatttgggaatgcttcaagtcaattttttagcctctgtgcctgcaacgtgagctgcagtgaatcctcagccccgtgctttgcacacaagaggaagtacttcccttgtccttcccaagaccatctctgcttccgggccaggtgtgtctccgttgtctccattttctccagcatcttcaatcacttcctcttcccctggctccttcaaacatcaacaggtttccattaggaaagtattcttcttttttttttttttttgagacggagtttcccacttgttgcccaggctggaatgcaatggcgtgatctcggctcaccacaacctccgcctcccgggttcacgcgattctcctgcctcagcctcccgagtagctgggattacaggcatgcgccaccaccccggctaattttgtatttttagtagagacgagggttctccctgttggtcaggctggtctcgaactcccgacctcaggtgatccgcgcgcgtcggcctcccaaagtgctgggattacaggcgtgagccacctggcccggccagaaaagtcttttacctgtgattgcctgttcattttcttccttctcactaccaattttttactttttttttggtctcgctctgtggtccaggttggagtgcactgacaccatctcggctcactgcaacctccgcctgttgggttcaagggattctagtgcctcagcctcctgagtagctgggattacaggtgcgcaccaccaggcccagctaatttttgtattttttgtagagacggggtttcaccatgttggccaggctagccttgaactcctaaattcaagtgatccgcccgcctctgcctcccaaagttctgggagtagaggcgtgagccatcacacccggccaagattgtgcattttttgagggtagggatcatgttgcattatttcttgcattttccaaagtagtcggcgcagtgcctggttcatggtaatccctggtcgtaatcaccaaactacagcctagttaaactcaccgatgggattccaccaaacctgcacccaagcagctgaatgttgctgaagaaaaaaggtgcacaagtttgtgccaatcaatgtaaaacatgctttctgtctagcattgcttcactattgcccaaatatgtttactttttcatgctccaaaatgactatttcacacagtctctcctttcttaaaccttccacaccttctttctcctcttgctgtcagatgaagagcttgcctcttccttttttttttttttttttttttttgagagggtgtctcctctgtcagccaggcaggagtgcagtggtgcggtctcggctcactgcaagctctgccccccaggctcatgccattctcatgcctcagcttcctgagtagctgggactacaggcacccgccaccacgcctggctaatttttttgtatttttagtagagacggggtttcaccgtgttcaccatgatggtctcgatctcctgacctcgtgatccgcccaccttggcctcccaaagtgctggggttacaggcgtgagcccccgcgccaggcttcgaaacgcatactcttaaatatcagttaagcaccttaaatgaaacatgttcatcccaatactggaacatgatgtctgtgaggacatggggctgtactttgttactttcttttaagagttttaaaaataaactcattttttttcccctaaactcgcccctttctcagtgggatttttctcttttctttctgttttttttccctccaagactaagttttgctcctcttgcccaggctggagtgcagtggtgtgatcttggctcactgcaacctctgcctcctgggttcaagcaattctcctgcctcagcctccggaatagctgggattacaggcacccacaaccatggctggctaattttttgtgtttttggtagagacgtggtttcaccatgttggccaggctggtctcgaactcctgaccccaggtgatccacccaccttggcctcccaaagtgcttggattacaggcatgacccatcgcgcctggcgtttttgttttttttttttttttttttttttttagatggagtctcattctgtcacccagggtggagtgcaggggtgcgatcttggctcactgcaacctcccacccctgggttctattgattctcctgcttcagcctcccgagtagctggaattacaggtgtgtgccaccacacctgggtaatttttgtgttttttgtagagtggggttttgccatgttgagaaggctggtctcgaactcctgacctcaggtgatctgcccacctgggcctcccaaagtgctggaattacaggcgtgagccattgtgcctggccacctgcattcttctctagctcggctgttctacttgttcctacttgtaatagactaaataatgacgctccaaacatgtctacatcccagtctccttgtgaatctatttgtgactatgttacctctcatgataaaagcaactttacagatatgattaaattaaatatcttgagatgtgaggttatcctggattatccaggtgagctcagtgtaatcccacaggtccttacaagagggaggcaggaggatcagagtcacagagagaggagatggtaacatggaagcatggaaaccaaggctagacggagacaggatgatatgctgctggctttgacaactggggaagaggcaatgaggcagcaatgtagcggcctctataggctgggaaagtcaaggaaacggattctcccctaaagcctacagaaggaatgcagtcatactaacattttaattctagccctgtggatttttttttttttttttttttaagatggagtcttactctgtcacccaggctggagtgcagtggcaccatctcggctcactgcaacctccgcctcctaggttcaagcgattcttctgcctcaatttcctgagtagctgggactgcaggcgtgagccaccatgcctggctaatttttctatttttggtagagaagggatgtcaccatattggccaggctggtctcgaactcctgacctcgtgatctgcctgccttggcctcccaaagtgttgggattacaggcatgagccaccgagcccagccagcccagtgaaattgattttgggattctgacctccagaactgtgaagataataaatttctgttgttttatgcaaatagactgtaatttgttatatcagcaatataaaactaataaaacactgtagtctaagacatcaccaccatctctgacccgtattattacaatagattcccaactggcttctctctctctctttttttcttgagacagagtcttgctccgtcaccctggctcactgcagccttgacctcttgggcacaagcaatcctcctgcctcagcctcccaagtagctgggactacaggtacacaccaccatacctggctaatttttaaattttttttgtagagatgggaatctcaccatgtcgcccaaactggtttcaaactcctgggctcaagtgatcctcttgccctggcctccaaaagtgctgggattatgggcatgagacaccatgcctggcagaccctcttagattttcaactatacaatacagtattgttaattgaaggcaaaatgttgtacagccgatttctagagttttttcatcttgcagaactgacattttagacctattgatcagcaactccctccagcccctggcaacaatcgttctactctctgcttctgggagtctgactatgttagaaacctcatataagtggaatcatgcagtatttggtcttctgtaactggcctgcttcacttagcataatatcctcaaggttcatccacgttattgcatattgcaggatttctttcttacttagttttttttttttttcttttttgcaacggagtttcgctcttgttgagagcgaaacttgttgcccaggctggagtgcaatggcgtgttcgtattctttttggagagaccaaggaaaaactttatccagttttgcaggaggttgttctctgacttgctagcggggagagatgagtgggattgtggataaagaattgagcctaggccgagtgtggtggctcacgcctgtaatcccagcactttggaaggccaaggtgggcagatcacctgagatcgggagttcaaggccagcctgtccaacatggagaaaccccgtctctactaaaaatacaaaattagccagacgtggtggtgcatgcctgtaatcccagctactcgggaggctgaggcaggagaattgcttgaacctggggggcacaggttgcggtgagccgagatcgcactattgcaatcccgactgatcaaggagagcgaaattccgtctctgggcaacatagggagacggcctccttcacccaccacctgcccccatctccacaaaatggaaaacaaacaaacaaacaaacaaaaattgaaccaagcaggggtgcggtggctcatgcctgtaatcccagcacttcgggaggccaaggcgggcagatcatgaagtcagaagttcgagaccagcctagccaacatggtggaacactcatctctactaaaaatacaaaaattagctgggcgcggtggcgggcgcctgtaatcccagctactcgggaggctgaggcaggagaatcgcttgaatccgggaggccgagattgcgccactgcactcactccagcctgggttacagaggaagactccgtctggagaaaaaaaaaaaaaaagaactgaacctagacaaagcagattggcacctaaattcacacgcttttcaaactgccaccacgtcttggcctagccttttttttttttttagatggagtctcgctgtgtcgcccaggctggagtacagtggcatgatctcggctcactgcaacccccgcctcctgggttctgggttgcagcaattctcctgtcttagcctcctgagtagctgggactacaggctcccgccaccgctaccggctaattttttgtatttttagtagagacggaggtggggggggggggggtgggtttcaccatcttggtcagtctggtctcgaactcctgacctcgtgatccgcccgacgcggcctcccaaagtgctggggattacaggcgtgagccactgtgcccggcctatcttggcctagtcttttaatttctccttcctcattggtaatttcagtataatctagcaaagagacactaattttgaacgaatggtgaaagtatgaaaattttgggatcaatcgatgtaaaaacaatttaccagagagccaccgccagagggggtatagctcagtggtagagcatttgactgcagatcaagaggtccccggttcaaatccgggtgccccctcgggtttctttaagtttttttcacagccatccaggaataacctgagtcagcgagttctgaatgcaaaactcacgggaggtgtcgtttgtatcttccacctacctaattttcaccttgaaaggattcccgtaccctagagggagagaacagcaaccagaggctgcctttaggtggatctgagccctcataccccaagtggcgataagcgcaccagtactctcagttggagaacaaaggcgcgtatcgatttccatctccgatgcccattggtttaacgttaattataatttgttttggggtaaaaaatatgtcttggacggggcagtagttcgtacttgactatgaaaactaggagaagtaatccaaattcagaggttttcatatactcgcgaactcgaacaggacagggcacacagatagaaggtagacagcgagcaattttcccctcttccttcttgactcagctcataggcagggctttggcttgataagctatacatggaaagttcaaggcctaaaggagaggtaaaactggttcctcctgggttttgcacggaaccgcagctctgctgatctgtgatctctctgttcagcctagagatacagctcacagtaataggagccaggagaaaaaaatgcgcgtttccccggggtccgaggaatgacacaaccacattccgggtttaaaatatcgcagctgccctttgacccaggcagcacgcctcttcctttctcctttatttttcctttttttgggcaaaacctagtcgagggggacgcccttgtctcccgtcacacttaccattttcctccggcccaacagtgaccctgtcaggcacgcagccagcagatacttgtccccatctttaggttatgaaactccatggccttttattcttacttcagtggttcttaaaatgtggtccccacaccagcagcaccagaggcacctggaaacttggtagaaatgcaaattctcggggcccccttacagaatcagaaactagcagtgttttaacaagccctgcaggtaattctgatgcacgttcaaatttgagaaacactgtgttcgtttatctcagtttgcactgggttataactttacttttgtacattaatagtcaaggatgaacacagcacgtccatgtcaccattaatacagaaagttgaagttggagaagggctgtgtctatgggtttccctcgcctgacccaccctccacccccaaaaggaacgccaagttgaggcgttcccctgtctccctacccccattggaaacatcctgtccctcaaacccggcacctcgaactgtctgacccatctgaggctggcgcccgtggccgcagaaatccctacacctctggcgcgagtaatgcggtcgcgcagcttttatacccaccccctcctcccgctgagcacaaagtaaaaccgaaagatttctgctaaggttgaaaaatgaggaagatactttttcttttctttttttttttttttttagtcaggacccaatgttaaaatgtgagtcaagaatgaaaaacagatggttaacaaggggaaggaaaaaccaagccattgagggggcacccggatttgaaccagggacctcttgatctgcagtcaaatgctctaccactgagctatacccccgcgcctctacagcgcctggaggcggctccttgggtgctaagcattgttgcagctgctacactgtgagtagtggtgtaacagaaggagaaaggaatgctggagaaaaaggggtcaagctgaacgcagacggtgcccgcatccggggaaccccgggaaggtgcactgcaggggctcgagagggaagcactagcccgggcccggcagcgcgcagggtccaagagggagggacgggttccgccccacaaatgtgggaaagggtgtgggccggaagagagctaagaggggcagggtagggggtccccgttcggtccgcagattcatgccgggtagaaagtccccgaatgcggtgaatcagttccagcgttcaggaggatccaaccccaccctcgacgggcttgaggggttagcccgcctcccgcagcccgggcgccccagatgtgcagcctgctcgcctctgcgccgcctccggctggggaagggccctgggcaccgggcgcagtcagcctgagagcgctgaggcgccagcaccgcgggccccgccgtccccccaggaacccgcccccgcgcagccccacgtcgcccggagagcgcgcctcgctgcgcgtgcccttgcccgcgcccgaggcgcgtgcccgccccagtgcagcccctcctccccgctgtgtttattaggggaaggagggcggaggcggaggccagttccccagctccagccgccgtcgctgctgcctgtgtagttgcagccgcggccgcctcccgccagctcgcctcggggaacaggacgcgcgtgagctcaggcgtccccgccccagcttttctcggaaccatgaaccccaactgcgcccggtgcggcaagatcgtgtatcccacggagaaggtgaactgtctggataaggtgagcccgggaccgggagacgcgtctttgcaatcccccgcagtgctccgaatccagggaggagagaagggccgggtctttgccgccttatccccgcgatcccaggagaatggagggagggcgagcgggcggtgtcatggggtgtggggacacatcccagtctgaaaaccaggagatctggggcgaggcgggaagtccacgcgtagcgggcagccgctgctggagaggggtgggctctgtgtcccggggttgggaggacgggagaggagcagggaagtcaggcgccggggtgtgttgggggaaggttaggggtgcagtcccgccccctacggcctggagagtgagaagagacggccgctccctctccgctctgcgccgagcgccaagtaggcggaagcgcggggcgctggtggagggggcgggggggcggggcagaggctggggggccctgcaaaaccgtccgctccggcgggggtggcctggcttcctggcctggcggggcgggggctatcagcctgcgagtgtgtggcatctgatgcggggggttttgggtaaggacccgggctctgccgcaagagccccgtttttgaacgacctgcacccccttggattcagtcgttaaaggactcgcagacctcctccacagcttcccaacccccacctccaattaaaagccaactcccggtgctgggccgtccagcctgagccgggtggggttgggtggcagagtagggtgggtggagggtgcttagctgagatctcctgaaattgtgctcagagccaggagaccgtgtggaagaacaaagagctaacttttcaaagcaggtttctccaatggagggtggggttggctgagttctggggaagccgaggaaagggggaggtattggggggaggggagggtggccttgtggagattcagtgtcccctgggggccctgtctccccaatgctggacttgttcatctggttgccattagacttttggaggggggttggagagtagaactgggtgtttcccgtacagtttagggtaggatcctgttctcttgtaagctccgtaagatcctaaggtaaaacctgcccctctgcatcccctccccagtctggaggggaggcctctgtgattttgtgcccttcctcaccgcgtctttcatccaccacccaaagctggctccaagtccaagtattctgtcctttccatctgaactgggagggctgggaggactggatggaagagaggtgcaagggtgggaacactagatgaaagaggggtatagagccctggggccaagttcattactgacctggagccaggttttgttcaggagaggatagtttattggacaccttatctctcccctcccccttggtgtgtgagcttcctcagtgacctttggcctctgagtcagcgtgaggaggtggggttggaggttctgaaagatatttgaacttgctcttggggagtgtgggcatatggggccgctgctgtgtcactgttcctcctggtcctgggcttgactgggcaggaggagaggagggggtatattgtgggcacgaggaaagttgttgatctccccatgaccatgccagccgctgttgggcaggacttgagcttagagctatcagataatgaagtctccccttgagaatgtacctgtccttgcacactggggtttcgcccgcccctcgtggcagagattttggcctctgcatcttgagttccctgtggtccccttcttctccacagtcatgaattgggaagaggcagtgggcacttgacccgtataaggaaaaagcaaaacatgaaggcaggattgccactccaggagttgggaaactgggtccttgttccaggtctgctcccaccagttttatgaatgtctctaggcctcagtattcaccatctgtcagatgggtatgatgatgtcatttccttaaaggtggggcagtgcactaaagtccctgagtgctaaagagggtgctgtatagactatgccctccctacctctctgggatgctctgttcagctccacaccactccccttggaaagaccttcagtgccgtgtacccgaggggaggggagcagggatgggcagggtgccctccccagttctcttaccctagctggaagaggacgttcaagtgggggttgcccagggaagtgggagttggtgattccttcctctttttagaactctccctataggaagtggccctggagagacctcgccccctgtactgagcaggagacctgaaatatccaggtatcagacctattcctctccacctgctccaggcagtaaggataggaccaggaatggggagccagtgcctggaggatgctgggctgtgaccagggaggaggggaaaccttcagtcccataggcagcttcagtcccatagttgctaaccaacttcccaaggcctcccatttacagcaaaagagtcaaattagactcacccgtttctctacaatcccccatggtactcagcccactacgtggcccaaagcacagggtgtgtccttggtttcagccttttctcctccctgagccttatctcccaaaggcataggtgggtaaaaaccttgtcacctctgaaggccaccctgcccccaacctgcagtacccagcatgctttgcaagctggataaatatgtattgctgatgacagtgtttgaggaaggaggtcgagatttgcttctccagaggacttctgggattagagctgggggagaaacagggtgacctcatttgctcattcaacaaatatttattgagcacctactttgtgcacctgctttgtatctagggagctgtgttgtcaagaacctcgccacgtccctctttcctggcttgcttccccaggtttctgaaaacaggtggaggtagaggattggtctgctgccagttcccctggaatcccctgttagggtgggctctctgcctctgcttgtctcagcgctccctccccactcgagggggttgaagtcctcacagctgtggtgccccgttttgctagctgaagcttagagtaccccaccatcatcttgtgaccatcccttcataatagctactagttatcacgatatgctgggctcagtcttcacagcagcctcacaaagtaggtgtattcgctcttgtaaacgatgcactccataaatggaggctcaggtagcccatgtggctcatctccctctcttagagctgaaattcacatccacagttctttctgctcagctcttctgccagtgtgtttgcagaaagtacttttatttatacatatttatattttatttacatctcatttgtgccaaaagtaggtcccatcccttcctgaccctatctggaggaatgctctgggcctggggtcttgtatgggggcgtggggccactgggaataatcctgtcctcctcggaatttgtggaggtgcagcaaagatctatgcctttaagccagcgggtcaggtggccaaccaagctaggctggtgccccggccagggtggggctggcattgcctctgcaggagggagaaactgtaaccctgggcaacaggaagggaagagatggtctcataatccatccctgagtcatggccaccccaggtagcctgggttcagaggccaaggtgccaggctgcaggcacagtgacacgaagcttgccacatcccccccaacccagagccacagagggacaggctgtcccaagtgaggggtatccttgcaggcttctgcccctaccagcctgtttacctttctttagagtgggttgcaggtaggcaagggaagatcaagatgaccctgccttggagcctcggatccaggctgagaggcctctaacaggcagcagaggtagggtctgtctggtttctgtgaacagggaagccatggactttgcaggcagcaggaaggggcagaggtgcatgcctcgaggtgcagtttccttgagtcctgaggcccaggaatgcttcgctgaaatcatcttgcctggggcctttaaaagaggggggctcttgctctgggacagagcccatggggcagggcagaggcagacggggtcactgtggggtcctctggacatatttccctgacagtgtccttccccagaccccattgagacaaggcaggagttctttcatcttagggtccaggcttggctcacagcggttgtggagggactggccattttctgcctcccctccccacaattttcctaccccaaaaaggacacagtggaaggagctggtgggttttcttgaaccttggggccttcctccagagagggtaggggagtcgcctgaagctgctggaggtgccaagcattaggggtggaacggcctcctctcctgaccttccagcactctgggagacagtggctgcagctccacttgacacttgtgcttcatagtaactggtttccatgtttctgctcagagccccctgcagggggacaggcgaccaccctcctctgccccacccttgggtgtctggatgagagtgtggggcctgtgagggaggtgggaaggagctactgatagaaataggtgccatcccctagaagaggggctctgcttcctccgcgtggcagcctggaggggtctttggaaccactgggtccagtgttggccctgtgccccctgcctgctcagtacaccccaccctccttctccaaggggcttggctccgggtgcaggcctggccatctggagtaggggtctctctccctttgtctccccaacgtcaatcaggaggcagccttggaggtccgtggtcctaggacagtgtgtagcccttcgtgtgtgtgtgtgtgtgtgtgtgtgtgtgtgtgagaaagtgggtcatggtctggattctggagaatgtttttcctggcaggcccctgtgggggtagggggaggcaggggcccaggcaggggcctaggcaggggcctgtgcagctaagtaggcagaggccagcagactgggtggtgaccaggctggggcaccctgccaatgcctcccagttactcggggagggagtggggctgtcacttcaggggcctgtgggggcagggaccagcctgtcttagtgtccctggtgggttctgtgtgttggggtatgcaccacttcaggggcctgtgggggcagggaccagtctgtcttagtgtcccggtgggttctgtctattgggttatgcaccagaaggagtctttaagttgcctcataggagtttgggggccctgggtcactgggataggcccaggttggggagggggccaagcttagacccgccacttctttgcttccagacttccggctggccgtcctccccaagagtggttctcctagcattctgtttaatattccaccattaggtttttcctttgggtcttcttgatagggaaccagtaccctattagaaggtgatttccccctgaaattaccctgggggtctctggttgaagtgggccatggtagggaggttgaatcccagattctcagccttctttctgctatcccctcctcccagtgtctcagaagcacctctccctccgggggtttggagacaacattttgaaaagcatcgccttgggggaattccttgacaaatggccaagaaccagctctgtggctgggctccttcaaaagtccccctgggcctgcctcctggcctccttcttttggaatggggaatgtctcccttgactactgggaaatggggcagggacaggccagccaggtcactcaggtggcctggattattctggggtcctggcagtggacccctgtttggtggtgatccagcacatcatcctgggcttctgggggtgaatttagatcctgttgtcatgggtttgcctaagcatcaatacttctcaggggttccacaaagacccctccaggctgccacgtggagcctgttagatcgtttctcttttttttttttttttttttgagacagagtcttgctctgtcacccaggctggagtgcagtggcacaatcttggctcactgcaacctccacctcctgggtttaagtgattcttttgcctcagcctcccaagtagctggaattacaggcatgcgccaccatacccggcctatttatttatttatttatttatttatttatttttgagattaagtctcgctctataccccaggctggagtgcagtggcatgatctcagctcaccgcaatctctgcctcctgggttcaagcgattctcctgcctcagcctcccgagtagctgggattacaggcacgccgtcactgcacccggctaatttttttgtatttttagtagatacggggtttcaccatgttggccaggctggtcttgaactcccaacctccagtaatccgcctgccacagcctcccgaagtgctcggattataggcgtgagccaccgctcccggctagatctgttctctttctgtcatcactctcttccctccgtcggccaccctggatgggccctgtgtcccacattctcttttttttttttgagacggagtcttgctctgtcacccagactggagtgcagtggcctgggttcacgccattctcctgcctcagcctcccaagtagctgggactacaggcacccgccaccacgcctggctaatttttttgtctttttagtagagatggggtttcaccatgttagccaggatggtctcgatctcttgacctcatgatccgcccgcctcggcctcccaaagtgcgggattacaggcgtgagccaccgtgcccggccgtgtcccacattctcacacgcatgaatggattggagctgtggttggcacagtgaagcccctctgcaccccaacacacacaatctccagtgtgagccctgaccccctcggctaaggttcacacctgctgtgcccagcacctgacatctgagtgctcagaggtgccaagtgctgtgctgagggctttgaaggtgatttctcctcagtcctggacaatcccaggagggccaggtgttattacatccattgtacacaccaggaagtgggctcctctgaggtgcagggccccgcccaaggccatacagttagtggggtagagctttgatgtccactataggggtgtccaccttcaaggctttgaagtagagcccttcagtgcctcagtgggagacccgctgccgggtgctctcctgccctcctcctggggtgggagaggatgagggaagggtagaaaggatgtgttgtgttgacagagcctgggacacccagcccactcctctggccaggcatcccacaggaagtgggaggtatcggagctgtagcaccacctggggctcatgtggggctggtgggtgtgctgggccctggtacaggagctaggagcacctgggttctgggcctgggtgtgtgggggctgggccttcctcttctgaggccttggtgccaccagaggagctgctccttcatgttcagcggctgctccctagcaacccagcgcagctttgcataagcaatgaggcctcgccagctctgggcaggaggggttccctggggagggtggagctgacttgggggctgctgccactgctataactgggctcttcccccctgtccttcatgcctgcctgtctcttcctcctgggttcaaatggcccattggtggaggatgaggaaggagagaggggaggggagtgccaaagcctgtgacctgaaatgcccccagctcacctgggatgattccatgttctccccacagccatgggcctaggacagtcccagcagctcctgagtgccccttcctagggcctgagcccctttttcagaagtcctggtatctgatgtatgtcctcctgtctccatccccagttctggcataaagcatgcttccattgcgagacctgcaagatgacactgaacatgaagaactacaagggctacgagaagaagccctactgcaacgcgtgagtcctgttctgggcagggggctgggtgggcaccttggctccctccccgagtgagttcttcctttccttccaataaccgcaaggtgacattggcgaacacttccatcccctacttgaacatcacagtttgtcctcacaacagctgaatgaagcaagcactttttatccccatttaaagtgcttttatcccccatttaaagtgcatttaaagtacagatgaggaaactggggcttagggaagggaagagactctcaaggtgggatggctagggcaagacaggctctaacccaatttcgggcagtaaggcgagcacgtttctttccactgtcccctgctacaaaagagggggctttcctcgtggtctttcaagaatgagtgacgtgtctgttgtatttggggttgaggactttgttctgtttaccttcccttatttctctcctcaaaatcgacagtttccttctctcacctgggtacttctaggctttgggggctccttcctccagtggttccttcaagaaaactctctggaagcctcatgccagcccttttggtgttcattttttgagaatgggcaggggtgcataaagggtgttgcctgggccagatagatctcttccctgcctggtgagggaggctgtggagactgtttcttttgagtatagtcatcttgagtatagtgcagctctgttccttctgcactgggacctgcagcagctgacggtagggagggagtatagaggtggggtcccccatcccagagcctggaggaatacctcccctcccatcccatcccatcccatcccatgcaatcccagaaagtacagcaattttccatcttccaattgaccttgtgagtagcaagtacaaactcagtgttggggcctcacagccgcctccacctgcgaggtggaggctttggaaggtcaagtcacttataagtaatgatgtaatgataatttctttttcttttaatttgcttttttttttttttttgagtcagaggactcatcacccaggttggagtgcagtggcgcgatcttggctcactgcaacctccgcctcttggattcaagcgattcttgtacctaagcctcctgagtagctgggattacagatgcatgctaccatgcccagctaatttttgtattttttagtagagaccggggtttcaccgtgttggccaggctggtctcgaactcctgacctcaagtgatgcaccgcctcagcctcccaaagtgctgggattacaggtataagccacctcgcccagccttaattcgattttttttttaattttaacttttttttttttaacttcaaccaactcaagtaatggtaatttcagtgttcacatgaatttaggatctgacttgagtccagttttttttttttttctcttaattctcagtcaggaggctctttgcagctgaagttcacccagggaaaaaaaaatttgggacttgtctaaaaagggggcttaaacctccagccttacccctaaccttaccccaaaccttccttgcttccttaccccctcccgttccctggctaagaccactctttcatctttttaggggctcgctcattcagcagacatttattgcctgcctgctgctataatacatactaacctgcaccaggtgctgggaaaacagattcctgataaaaatctcaagcccaagaagcaacatgaagttgtcccttctggaagaaggagggcactgggcaggttatctgggtaaaggaagggttgcagctctgtcctggcccctccttcagctgccccttctcttctattaatttctactgttcctcttccccctaccaacccctcccacccccacaagggaaatgggacattcttcgaattcttaagggctcacacaagccctggttctctgccacttcctccctccattgggtagtggggtggggttcagagaagccagggcagttaacccctccgttgctggaccacctcaggctagattctgagcctccgccccagcacgcagaagtctgaccgagccttggagcccagtgactcaagcagcctagaattcagtgagcactgggagctggagaaaaatcagaggcttgtccttgttttctctgcgttttatcagcctcatccaaagttccagcttactgtttttactgtcttcttgggaagctgccacaaggttgggtggagggctcctgcagggactgggggagccagaagaggcagatcaaggtttcttctctgggtgatgcttccaacttgcagaggcagaggttcccctgtctccctcctggcctccagccaaaagaagcaggttggcctctccatgtttcctccagcttttgtagccctagcctctgccatgcctcattgacctttggcccagttgggatgtttcctgggaaggagcctagtgagagagacctgggggctttgtgacccagctgtgtttcactttagctgtagtagcacctcctcgcccaaggcagtcattctccctcccctgcatccactgggccaagaagttacccgtggggattctgggatgaaccaggtgtggcgcccgcttgcaaggagtgctctctggacgtgtctgagccttggtttccccatggttaaaaattcctgcccaggaggcctggcatagtggctcacgcctgtaatcccagcactttgggaggctgaagcaggtggatcacttaaggtcaggagttctatcagcctggccaacatggtgaaactcgtctctactaaaaatacaaacattagccagatgtggtggtgggcacctataatcccagctactcaggaggctgaggcaggagaattgcttgaacctgggaggccagggctgcagtgagccaagattgcctctgcacttcagtctgagcgacagagcgagactccatctcaaaacaaacaaacaaacaaactaaagataaaaaaaaattcctgcccagggatgttggaccctagaccaaagaggatttattgagctcttgctatgtgccagacgctaggccgagtgtttgctgtcattccctcctgctttcttactttttttgtttttattttgctttggttttttggagacaaggtctccaaaaaaacttcgtcctgctcagtcacccaggctggagtgcagtggagtgatcatggctcactgcagcctccacctcctgggtttaagtgatcctcctgcctcagcctccctagtagctgggaccacaggcatgtggcgccatgctaatttttaagttttttgtagagaggagggcttgtcatactcttggcctcaggtgatctacctgctttagcccagcctcctcgtgttttcttcctgcctctggtcttatccttgagtgacattcaggttcctgaatcctgggtttaccagggtacagctttctgccatttctgttctggtcttgctttgtggaccacaggcctggcttccttctctgaagcatcacgtgctccatgctgggccaagcccagtgcaggacccgtaggggcacgtggtttcttctggcactttgccagggagttgggcccacccagtgagtgtgtgagtttggtgtgcagggaggcctctatgttctgcctgtctctggctagtctctgaggggagctaggatcttgcagggggctggtcaagaaagaagaaagctatctttccctgtggtttctcaagattcagatttaagctctagaaagtgactgtaaagtaggcagtgaaaaggcctcttctgtttctgtccttgcatcagacttgtttgggggagaggcaggggagagaacataggccagagctcactgccagcccacctggtgtggcggacccccacatgcgtgcagttacacacatgcctggtgtgtaggcagacacccacgccggtgctggggcgggggaggaggacttgggagctggactgaatgggctgtgtttgtgtttccaccttcaggactgcagccatgcagccaatgctgtggcaaggttgagggtgcactcccggcttctgcacaatagccagtggtggaggaagaactgctaatagaattctttttgtttgttttttttgagacggagtctctgtcgctcaggctggagtgcagtggtgcgatctccgctcactacaacctctgcctcccaggttcaagcgattctcctgcctcagcctcccaagtagctgggattacaggcacctgccaccatgcccggctaatttttgtatttttagtagagatggggtttttccatgttggccaggctgatctggaactcttgacctcaggtgatccactcgcctcggcctcccaaagtgctgggattataggcatgagccactgcccggcccgaattctttcttgaagcttctgggtgggtggagtgagcctgctcttggtgagagagatatttaagagagatatttatgccctccattacttgttttgtaaactggattttccaaaagtggggcagatcagtccacacgcccaggcttagcataaacctgcatcgttgtctccctgcagatagtctagagtactgcctgttccctcctctttagggccctactgacaggaggcagggttgccagccagggaaaccagcttgtgaggtgtcaagtgggaggtgggcatgggctggggaaggaaaattgggggacttggttgcacctttcccctcttctctgactgcacatatttggggttcattctccagtttccttgagctgtggggtaaggactgaggagggtaaagatgtccctgattctggggagccaggaactatgtttctgccccttcccttaggcatcagatgggagtagggtgtggtctgtgtcagacaaggctgggtgcttaagtgtctctggattctagcaaactgtctttaatcccagctgcttttaaaaggtggggcagggttgggtgcagtggtttatgcctgtaatcccagcactttgggagactgaggagggtggatcgcttgaggccaggagttcaagaccagcctcatctctacaaaaaatgaaataaattagccgagtgtggtggtgtgggcctgtggtcccagttacttgggaggctgaggcaggaggattacttgagtctgggaggttgaggctgtagtgagccctgattgcaccacagcactccagcctggcaacagagggacactctgtctctaaaaaatgtaaaaatgaaaataaaaataggtggagcaggagtaggcaaaccccgcactggggcccagggctttccctccttcccaaaattgtctgcctctaactggaaaaatggggactagggatgacagtgtgggggagggcaagtgcaaatggccagcccaagtagccaaatgtggcctccaggtagccctcccacctcacttacccccaaatccctgtccttcaggcctcctggagcctgagggatcactttgcttcctaacacctacgttttacagatgaggaaacaggcccgcgtttccatgccttactcaacttgcagaattgtttctcttctatattaccgacaggggcaggcttttttttttttttttttcttttcattttgtgtgcaatctgatggctggtaagttcttcctcaagtctagccttgatctttttgactgctcttttttttcctctgattgaacaatgcctccttgttgcttcctatcgccaccacttcagccccttaggcctgaggggatggacgggtgagaaactgggttagcagggagccctcccttcccgcctgtgggcagccttcccagtaggggcttttggaatccgcagctctttctagaggcaggatgtgggggctgttttttttttttccttttggtaaaaccaaaagctccttgttgcttttgttgatgtctttttgttcctccttgaacacaaagctgtggtttttgaagagatccaagcctggaacgggcgaggctctgtgtagaaagggcgctgggctttcgggttcgctatcctgttcttctgaccctggagtgtggctgatggcaggactggagagtgaggctggtggctgacaagctgtccctgtcacctgtgagcccggaaaccttgcccctgtagtcccaccaagcaggaaggccacccagaggtcctcacagataacccctctcctgggacacagggcctcttcagtatcatatccttttttttttttttttttaatttttattttttgagacagagtttcgctcttgttgcccaggctggagtgcaatggcgcaatcttggctcactgcaacctctgcctcctgggttcaagcggttctcccgcctcagcctcccaagtagcggggattacaggaggccgctaccatgcctggctaatttttttgtatttttagtagagacggtgtttcaccatgttgtccaggctggtgtcaaactcctgacctcaagtgatccgcccacctcagcctcctaaagtgctaggattacagcgtgagccaccacgtccggctttttttttttttttttttttgagatggggtctctctctgtctcccaggtggaagtgcagaggtgtgatctcggctcactacaacctccgcttcccgggttcaagggattttcctgcctcagcctcctgggtagctgggactacaggcgtgtgtcaccacgcccggctaatttttgtatttttagtagagacagggttttgccacgttggccagactggtcttgaactcctgacctcagatgatccgcccgcttcggcctcccaaagtgctggcatttcgtgcccgacctgtatcatatacctttgaaaagttcagagggataggcagctcctaagcaggtgtggctgagaggccccagaatatctctcataatggccgagcttggaaacgagttgggtttgaaggatgaagtgctttgttttgcacccaacctgccaagcacatctttccccagaactgagtgctggaggtggctggggtccatctggcctccccttcgctgtctgggcagctgtggtgtagaggagaatgccttgggcaaggtctctgtccttgacactggacctcagtttcttcatctgtaaaacggcacaatgagaatgccagcctaaagctgtgtggtgggttttgagagagaatgtgcacaggactcagtgtgccaagatgttgctttgtgtctctgtaaattgtcctgaagcccgaggctgctgccaatagctgcctgtttgccctgccctatccctgtccagtccctgttcctgccccgcttcttcctgtcctacatgcctctccctgcaaactccccagagcagctgatagcagggaggaagggtgggtggggcacctgcagagagcccaccacccacttggaatgattaacaaggggccagtacaggctggcctatgggacaaaggacagctgtgctctggactctgccctgcacccagctgatcacctgtccctcattcctcgccatggcccagtctgtcatggggttgggttccagcggagtcaccagctgggacgggtggcccctggtctgtcttagcacccatgttggcatgcacacatttccagccatccctgctgggatctaggggtaatggatgggatgggcaggaagggaaaaggtagaattcccaaaaattgtttctggagggaggtcaaatcagttggagctttctttgaagcccggcatgctggtggggggaggggtgcagcactgatgttctcatgcctttgcttctagaaacaaacccgtgacacttgtcctcctcacctaaattatccagaaagatcctatagacacagtctcctgactttgccctcatgggcttctccttagttgaggacccccttgctgtctgtgcctcttcctcaacccccgtagacctctctctctctctcactcattctctctcactcgctctctcactctcactctctctctctctctctctgtctcgctctcgctctctcctcactctctctctcactgttgctgctctcctgcctggagctgaagatgaggttgccatggaaacctgaagcgtagtgagccgggagagggaaaggcagagtcgtctcgccagggctgggggctggggactggggactgtgggctgtggggaggggacagggttgacccagcaagaggaatatagcccaagctgtctgcctgccttcctctgcctggggttgggcttagtgggcaggggaaggagcttggaggctctggagtgcctctttaatctagttaatctgatgcaggattaaaatcctccctcactcctgccaaattaagctgagctcacatctgggctggctcacccccacttcccttctgatgggattagcactccagctgtcgggggctgagactagggggaagggtgcttctgaagaggatgaagtacctgccaaccccacccaaggtgcctgctgcatgttggaggggctcccgagaccgtctggtgggtgtagggtgagcagagggacacagtgtggggtgcagggggtgtgtggacatggcctcaatgcagctgctgcctgggtgtcttggaggcgcccatcggtgcagagggcacatctatatattcatcgtgtgtgaggcacagtgcagtgtgtgtaggaacttcagactgtggaatgggtggggcacgtcaggtgcacctgtctggcggtctttgggcactggagctggcctctgttttatttatttatttaataaaaacaggctctcgctctgtagctcaggctggtctcaaactcctggctcaagaaatctgccctccttggcctcccaaactgctgggattacaggcgtgagccactgcacccagcctggcctgttttaaccctgtgcattctggccaatgagaaaccccagggttttgcagaccgggtctggaggatgtgtttgccctgcttgcctctagccctccccatcaaatgctaaccagcctcatcttctcagaattgagtcttcgagtgctgggccagagctgcccggaggtctcctctcccccaccctgcttttgccacatgtgcctctacttccatgtgcttgcctcaccacagcccctgcccatacagtctgcagaatggctctgatgttgggaggagggtcgtctcgtctctgaagcgctccctcttagggcctcagggcctgccagccctgctagagatcttccctttctggtctctaggaacagactcgtggttgatcatcccttggcctggaattgtacaggaactttgaagggagctcctcagctgtgggtggccctggctgcacggggacgaccccagacttggccacgtattcatcacaggccacgtctgttgccagctgcggacacctgtgtttgcctttcctcatcttcccttcctctgctggaggaactgcgagtctgggctgacctgggtggccaggacccaggtgagggctgggggacgggcaccgctaggatcatctggatccgggacagtgaaactggcccaagggaaaaaggatttgccaaggtcacccagtaagtcagtggcagggccagagccctgcactgggccctgtcaagttatgctcctttgattgaggtctccaaatcctgagccctgcccttcacaagtggtggcctcaggggaagtcgcctgtttacaggtagctctgatgcacggccatgtgggcggcaggagaacatgccgagcagaggggcagctcgttcttagctctcgagtgtgtcagttttgggtggaacgtgcctaggaagaggtcccaggaggccatctatggcttacctgggtgcagcctgtgagtcagggatctgcaggggtcatagctgtggtgggctgtggtcacccagggctaaaaatggcctgacgggctccggcttggagaagccacccaccagtccctgaagtaattggggcccatgcagacccccagacatttctcatagcagcacatacacacaaaccacatggctcagagctgcctgtctctcctgcagctggtttgctaggggaccttgtgatgagagagggatggagaagggctgagttctagtcctgcaccagcttcaattcctggcgtgacttttttttttttttgagatagagtcttgctctcgcccagactagagtacagtggcggatcttggctcactgcaagctccacctcccaggttcaagtgattctcctgcctcagcctcctgagtagctgggattacagctatgcgccacggtgcccggctaatttttgtatttttaatagaaacaggatttcgccatgttagccaggctggtctcgaactcctggcctcaagtgatccacctgctttggcctcccaaagtgttgggattataggcgtgagccaccatgcccagcctgacatttgtttattcaacaaatatttactgagcatcgcctactattctaggaacttgagataaatcaatgaacaaaagagaccccaaaatccctcccttcatagagaagtagtggagagagaagacaatacattgatgtgataaataagttaattatgaagactgctaagggagaagtgcctggtgccagcacaccgtttcctcctctgaaatgagggagttggaccagagtcttctggaggtctctgcaggctctgagggttgccgtggcttcggctgcctccaagccaggccctcttcctggggaccaggctgtgctgggcctggaaattggcggctaagttcagcatgaactgaagaaatcgtctgggcgcaaatctggatccctgtgtgtcttggccatgttgtttaacctctctggcctcagttctcccatctgtcaaaggggtacgctgaataccagtcacacaggtggctgtgagaattcggtgaactagggcacataagcccttagcacagggagaacattcactgtttgtttttttttgttttgttttgttttttctttttgagacgtagtctggctctgtcacataggctggagtgcaatggcaggatcttggctcagtgcaacctctgcctcctgagttcaagcgattctcctgcctcagcctcctgagtagctgggactataggcgcacgccatcacacccggctaatttttgtatttttagtggagaccggggtttcagcatattgaccaggctagtcttgaactcctgacctcgtgatctgcccgcctcggcctcccaaagtgctgggattacaggcatgagccactgcgcccggcctaattcactgttgttactatagattgagcagccctaatccaaaaatccagagtctgaagagctccaagatgcaaagctttgagtgccgacgtgatgccacaagggaaaattccacacctggcctcatgtgataggtcataggtcaaaaagcagtcaataattttgtttcatgcataaaattatttaaaatattgtataaaattaccttcaggccatgtgtatgaggtatataggaaatggtcccatccccaagatgtctcagtatggatattcaaatattctaaaatctgagaaaaaatccaaaatctgaaacacgtctggtcctgagcatttccaataagggatactcaacctgtattttacctgtcaccctcaggtgacctccttttttgtcctcaagctggccttcccacctaccctccagttaggttggaccttgttaaccgtttgaaataccactttaaccgtgtgttttctctctcaccacttcctccaggaagtccccctggatatgtgtgtccctttgtttttctgtctcccccttgctctcctctgcatggtcggtctccacttctggtcttagctgaaagcttagtcctgactcacctgtgcccatcttcccccagccgggcccagttgcctcgacctccatgtgtggtaggcacaaggcatggattatccccaaacaagggtaaccttcaaccctcagagagtggcccagtggccatcctttcgctcaggacagttctccttggctggcccatcactgatgcctgctgcgtcttcccaggtcagccagtcccagctgagtctgagaaacgcttgtctcccctcggccttggtggtggacactgaagtcctcctgtggggccgggccagggcgtgcccaagcataggacgaagttcccaggagggcatgctctgtgagaagcccagaggctcctgcccctcccccagagtcacccccactctgttttttctgtcctgcagacactaccccaagcagtccttcaccatggtggcggacaccccggaaaaccttcgcctcaagcaacagagtgagctccagagtcaggtgaggggctgggcggtgctggggcctggcagggagggatgctggggagggaagttgtaaggtcggcatttggcaagagtaccttcccctgcggttactctgcaaggccaaggtgctgaaatcctagcattgcctttaatcttgaccccacccctgactttatcaaaggagcagggtagagcgttctcccacttcctacctagagggggttggagaggtgtgggtgtctatttgagcccgctctggggctccctaaagcctacctcctccaggaagccactctcccctccctcttccccattcacactcacccacaaaggaggggtttggggaggaccagggaatttgcccctccaggtcatgccagtctgaggctgggcaaccaaccctctatagccgcgtcccaaacctccacccactgaagggcaaggtgtgaagggggccctgccatgggggcacaggatagggggctgttccgcctctgtctcctttggcttgactttccagaacactgctgagtgggaggtatgtgcccctgtaggaggggaggacgggttccaggcctagggagaacttggtctttaggggacacggaggaataagcaaagggtctggagtcctgagaacagaacagctgacccaccctgcctgggggtgcgagggctcctgggacaaacctggccagtgatgaggtggggtggggtggggcggggcttcagccgatgaaggattaggcgcgagaatacatgtaggggaatttaccacgtgggcagcgcgcccaggacccactcaggatcgggagaagactgcagaggttccacccgggccacagaggggatctctcccagttcctccagaggggactcctgctgcctgatcttgatgtgactgcccgggtccatcagggagaaccgaccctgccttttgtcaggctttccatgcaccctctctcagcatcctcccagcagccctgtgaggaaggtgctatcttccccattgttacagatgaggcgactgaggcccagcgactttgagggactagctgaggtcctgcgggtaggagaggcaataataatattcacagctgacgatggagggctcagtgctcccggcgtgtgagctcgtttaatcctcacccagccctgtgcagctgtagcatcacttcacttcagagaagaggaaatagacactggcagctttgaatgtaggtttgtctaacccagggactatccactccccaagaaacagtctctaccttaataataaacatgatagttccttatgctgttgagaagttttgtagtttagggctgggagccatggctcacgcctgtaatccctgtgctctgggaggccaaggtaagaggatcacttgagcccaggagttcgagaccagctggggcaacatagcaatacctggtccctaaaaaaaaaaacgagcagagatggtggtgtgcacctgtggtcgtagctacttgggagtttgaggcgggagtatcacttgagctgaggagttggaggctgcagtgagccatgatcgcaccactacactccagcctgggtgatggggtgagaccctgtctctaaaaaaaggaaaagcaagaaattgtgtagttcagcaagtgcctttagttagttcccctgtttatccttgactgggttctgggagaaggtaaaagacccagcgtctctgtcttacagataggggaaccgagtgagtgaatgcggatccaggatttgggccctggtcttgtcactcccaagtctggggcccttgatgctgcacagccctggtagggcctgaggctcacagaggaagagagcagcagctcacacctgccacccacccacctgcggcacagaagctgaagttactaggaagcagggaacaccacagcctgcctggccatattttacagattctagccaggccctgactcctgccttcaattccctgccctgtggaagggccatgggggccagaggtggaggggctcagaaggacctcggagaagaggtgctgggagcagatagcaggtctttggagacacacacacacacacacacacacacacacacacacacacccttctcaggggagaaattcaaacccctcagcctttgtcagttccacaaaagcgtggctgcagctctttttgccccggcaccctatccccgaggggtggggtttgaggaggaagcacctccacgttgttccccctgcccaggatgggcagcaagtgggcagggcatgctgttggcaggggctgcttctgccccccacaggggaagccagcaccacgctctgggtttgggggctcctgtccctggcctgtgccccctgcttcccagggtcatagcctgctgggttcccgggggggcctcttgggagatgaaaatggcggtcactcttcattagggcctcactgagggccagagcgtgtccgtgtgtgtatgtgtgtgtgtgtgcgtgtgcacgcatgcacgcgtgtatgtgtgtgtgtgtgtgtgcaagcatgcacgcatgtatgcgtgtatgcctgactttgtttaatccttacagccacctgatgaaagaggggctcttattatccccatcatacagatagggaaactgaggtttacagaggctgccctgcttgtgcagagcccagggacaggggcagacatcaagtcccatgacctggccctggagcccgttgctctgaacagtgctgatggcacaggcaccgagccctgtgctcccaccctgcaggatgcaccagtcagcagcaagtaggatgggcttgttggaatgcagattcctaggccccacccaagggacttctgcttggcagctctgggtgaggcccaagaatctgcattttgactcccccgtgattctgataaggacttttggccccactttaagaagcttagagatgggtccatgggcaggagtgtaccgaccctgtttgtatgctctgaggggtgccacattagggtagggctttgcactaagggcacggctctgttcccctgaggtgggggtcctcgggggttgggggctgagggcaggataggcaggggaggaaagggtactgccctttttgcaggcctgttctgtctcccttcccaccgcccaccagctgtgtggtctgagactggcctcagactgtctttcctctcatagctttgcttcctcaccagtaaaatgaggacagcaaacccagttgcctcaagctgggggctgggcctgatgctttgaggcttggaagggctgagccggccaggctggagcagtgacgggttctggttcctgtggctgccgtgggggcagagctggagagagctgcctgcggctagcaggaagggaagggggagcctcttctgctcacccagcttcaccccacggggtcagctggcttctctccatgccccttctgggcctgccttgcccttccctgtctctgggaagctgcccaggctatttcagctttatttattttcccatctctatattggtctccaaaatggcactttgggtgtctgggacacctggagcctcccctgtggaggaggtaaccacagaactgtccagaaatgaccctctcggtggtcctgcccaggcctggctgaggcagggggctggcagctggacccccagccccccttctcacttgctgctcctatcccacccccaggctgagcagaggcagtggctttggggtgggactgagctggaggtgtctgtatggccctgagcccaggcagaagtgccaagtgccagtagactgttcttccattttttccttcatcaactcaccttgatggggtcatgggaaattacaggggggtttctatcctcctcggatcttgtaagcagcacgggtggtagagtatcactcttacccgaactagctggcctgagattgaatctcgcatctgctgccaccagctgtgtgaccttgggcaagttgcttaacctctgtgcacagtgccttcgtctgaataatgtggattacctctctccagagggtggtgtgagataggaggatatgttaagcatttaaagattcctgacgtggagtcagcattcagtgtttgctactactgttctcccggaaaggagaggaaatggaacttggacatgaagaagctgggaaatacacacagcaaccttttgaccatgacttccagccccggccctttccatcagctctcctctccatctgtgtgtgtctaattttttttttaaatttgtatttttttgagacagggtctctctctgtctcccaggctggaatgcagtggcgtgatcttggctcattgcagccttgacttcccagactcaagcgattttctcgcctccacctcctgaatagctgggactacaggcgtgcatcaccatgcccggctaatttttgtatttttagtagagacagggtttcgtcatgttgcccaggcttgtttcaaactcctgacctcaagtgatctgcccacctcagcctcccaaagtgctgggattacaggtgtcagccaccgcgccctgcctaaattttaaaaactagtgtttcttttttgttagaaggggatgggttacaaagtatgttggcccaacacatggtaggcacataatagtggaaattgtatttcgctcaataaattttgtatttttttagagatttttattaattttttttttttttaaatagagatggggtactatgttcccaggctggtctcgaactcctgggctcgagtgatccacctgtcttggcctcctagactgctgggattacagacatgagccattttgttttttaagtccagcctaatttttgtgttttttttttagacggagttttactctgtcgcccagcctggagtacagtgtcaccatctcagctcactgcaacctccggctcccaggttcaaggaattctcctgcctcagcctcccaagtagctgggattacgcccaccacgcccggctaactttttttgtattttttttagtagagatggggtttcagcatgttaggctggtcatgaactcctgacctcaggtgatccacccacctctgcctcccaaagtggtgggattacaggcgtgagccaccgtgcctggcataatttttgtttttaagtaatgatccttcttcttatattgggtcatcaaggcagttgttttcccaattatgctgctttgtttggagattacgtgtctgcattcaattcattcatgatccaacaaatgttgatctgcacctcctgtctgctgggatgagaagcaagatagatccagggagaacaactaagaactgacagaaaaattagagtttcacggatggtggttgtttgggtgtcaggagcctcagatgtcagtcagtcctgggcctgacagcagagtttccaaaatgggagcccaggtatctcccaggagtggggtcctctgggagcccaggcatctcccagaagtggggtcctctgaccgaagcgctgagttgcatcctggcctgagcgacaactgggttgtgaccttgggcaggtcccttcctccacagggacccccacagcaccctggtgagccatcctagacaacaggggcaagcactcctgccagggcaagaagggagccctgaagaggggctctgggctgggccctccctacacccctggccccccacccttcacttctgccaccccttccatacccaaagacctttcaaagagcctccctgtcttgattatccatagtcagggtctgaaggtgctttaaaatggtcacagactccaaatgggagggattttagagatcagctagccagctcccttcaggggacccagagaggggaactgacttgcttagaaacacacagcaaggtggtgctgatcccaggctccctcccttctcagcccctacccctcacccctaccctctgtgggcctcctatgttagcagtgaaatgaatgatccttccccaacagggagggggaggcagaagcagttcccgatcctgggaacctgctgatgtcattgcagcgtcgccatggcgattattcccctggattaggggcctgacccttgcaaagccaggaagcaggggacggagtgggggactggcactcgttcagcacttcattgctgacagagcactttcacactggccctccacagtgcgctgctgctttagagccactgtctgtatcgtgggttggagtgactggcgttatggtccccattttacagatgtgggaactgagtcttgagatgtgaagtcgttggcccaagatcactcagaagtgggagactgagcctgcgttagtgctagctccgcctggctttgtgcccagacttggtgataagaagccccctccccatattatacctgatttctgtcacaactcttttacagatgaagaaaccgaggccaggggcttgagatgcagggcttctgtatctggagctacatttctctgcctctgagtgccctaccttccccgatgcccgcttcccaaagggcctcccactaagagtcaccgtgctggcccagggcttccaggactgaggaagagctggtgctaggcaggttctggactcttggggtgggttggtgcctctatccactgcattcacttctgaactaatggggaacagcacatccaagcccttcttgtctggatcagaacagagaaggagagggaaccacatggatgagtgactgggggcttcaggagacaaacaaggactctgacccccacaggcatgtgcagaggacctgacaggtgtggccgtggctgcatgcgcatgcgcagtcgctccagtccaagcacagctcggtgctgctgccagatgattccctgccagggaactgcctgggtttgtgtcctgggctgacctgtgtccaggacagtgcagcccccgtggaggaaatccaagcagctggtggggtctggaacagatggctgatgaggtggacagtgaagtctctggaagccaaggaatagtttcctgttccatgagttttctcagcctcattctgttcttcaaaaccctcaggggaggacaagctgttcctcatatttcaattcctttcgtgccagggaagtcctttctgatgtctgacttgagtccctctagtactgtggtggggtggaagggttcttccctggagcttggagacctgctgagatgctgtctgacccccgctgctttcctcccctcctatggcggtggcctctgaagccatcccggcaggctcccagaatccgcggggcctgtcaaaggcgcactgatggagccttccctggggctgtctcaccaccctcctttctgggcaccaactctgtcctttggcacagccctcactcagctggttgctgaaaagctcccccaggcgtagtgggcagggccacatcctggctaacatgagggctggggccaccctgggagccctggaaagaacctttttcctataagcttccagacaggatgggcagggagtgaagggtcaagagtcaggcagatgagggtttgcactctggtagtgccggacattgactgctaagctctgtgaccttgggcaggggactttgcctttctgtggctccgtttcctgatccgtaaattggagctgttaattgcgtggctatatgtatggtgggatctaaatgagatggttcatgtaaggccctggactctgtgcctgccattcactgtgcaccaaagacttggtagtggcttattattacgagtctaacaccttttggctgaggcctctgctttgagttggggacttctgatcagggtctttctgctgactccctgtccctgtctcctgactggttgctgcctcagaggggccccaagccgaggccctttcggctcctggcctgactccaatccctcttcctcccctcctgcaggtgcgctacaaggaggagtttgagaagaacaagggcaaaggtttcagcgtagtggcagacacgcccgagctccagagaatcaagaagacccaggaccagatcagtaacgtgagctcttgccctgccctgcggcatccctgctgccctctgtttggtccccttcctgccagcctggcagacgcaagcctggcagatgtgaatgaggccagtgcctccactacccctgccctccagggtgggcctggggaagagcttggggttcccagatgcctcttctctgtgtacccccagaccaccagcacgcatagcattttcttcttgaagggactgtattctgtgggggcctgtgtgctaaatcagcccccactctctctgactgttgttcttttttctggatatcgtgggtatcggtgaagactgcatgtctcatcttagcacaaaggtcaaaactggggggcggggagcacctggcctcccctggtctgcgcctgggtgctgacattgcagtcatttccgcccttccttggcctcctcccccacatcagcctgctcttccttcctgtgtaaaaaccccagccagcttcacccgccagccctgcaccccctggctcacaccccccgcctccctgatggtcagtggcatctggctgtggcaggggtgggcatggagagtgggcaggggatcaactgtccccagcatcgtgtgccctccatggcacctgtggccagagaacaggcctcagtttcctgcttggcagagccacaggcaagcagcctgtgtggctttaggcatgcgggggcagggcactgcggtgagcagcaaccatgggggatgcgcacacagaactgcaggggctgcccagccagcctggcctaggaggtcctgccagggagggtttaggcaggcagctgtcttcgtgtctggaacaggaagggatcagtgagctgcccattgttgctctgggctgaggaactggggatagagattgccgggggagcctggctttccggtggtctcagcacccactccctgggctccacatcccttcctaccctccacctggccacctcagcagggcgctcctttaagagcttggctgggccgtgcatagagtgggctgcagtggtgggtcaggtggatttcagaagcacaggcagcccacagacagcagaaccagccatgcccaaaatggtggctttcaaactctgacttcagcctacagtaaaatatacattgtacgtcttgacccatctgacaggcatacatttatgtagagggaaaacagaatggaagctttcatgaatgagtacttcctacttagagggcgttcagatctttttttttttttttgagacagagtctcactctgttgctcaggctggagtgcagtggtgctccgcctccagggttcaagtgattctcctgccttagcctcccaagtggagtagctgggattacaggtgcacaccaccacccccggccaatttttgtatttttggtagagacagggtttcaccatgttggccaggctggtcttgaacacctgacctcaggtgatgtgcccgccttggcctcccaaagtgctaagattacaggtgtgagccaccgcacccggccacattcagatcttttctaaagatgctggttgcaggcccctatacaccctcacataatacagcccctttgaggactgtattcccaacactttgggagactgaggtgggaggattgcttgagcccaggagtttgagactagcctgggcaacatagcaaaactgtttctacaaaaaaaaaaaaaaaaaaaaaaaaatacaaaaactagccaggcatgatagcacacgcctgtggtcctagctattcaggaggctgaagtgggaggatcacctgagcccagaggtttgaggttatagtgagccgtaattgcaccactgcattccagcctgggaaaccgagtgagaccctgtttccaaaaaaaaaaaggaccaggcgcggtggctcatgcctgtaatcccagcactttgagaggctgaggtgggcggatcatgaggtcaagagatcgagaccatcctggccaacatggtgaaaccccatctctactaaaaatacaaaaattagctgggcgtggtggcgtgtgcctgtaatcccagctacttgggaggctgagacagaagaaccgcttgaactcgggaggcagaggttgcagtgagtcgagatcgggccactgcactccagcctggcgacagagcaagactccatctcaaaaaaaaaccaaaaagatgctggttgcagacttactgtgaatgggttttgcaactggactgttgacctgcagtttgaagttggtggcctgaggaaatggcatgcttccctttggctagcaggggatgcctagggcgggcactctaatcctccttcccctccaacttccagaggcctgtcacagttgactctttatatgctagggcctggcctcacgccctggagcttccctttggctcagaccctgcaaagggtaagacccttaggtctgtgtttcagagctctcggcttggaaagtgggggagggggaagatggtcttagattatggggaaaacccggaatggttcacagaactggaatgtcggctcttcagcctctgcggcttttcatgtagaggctctagtcttttatcagtgacacttgctcccaatgtgcaaccccagctccctggctgttcactcattgcttcaccctgtgggttttggaggaggggagacaagcccagtcatccctgcttccctttctggaaggcttccagaacactccacactcagcctaagccacctcctcttcttccctcccccagttagaggtgttaatatcctagtgacaaaactcaccaccctggccaagccatccgcatctcaggagataaccatcttttacccttctcgcggtgctgcagtgagctaatggtcctctgcaggagctgggggaagggatcgaccccgacctgctagctgcttttgcagctttagcagagacctgtagggtgtgaatgcaaagcctggagactcttggttttaatgaaagcaattacagtctgtcggatatgggcctccagacagctgtagcacagtcacctgtagggttgactgaaaatgcagactcacaggccttctcccctggctgccagaatcagcgtctctgggagtggggcccaggaatcagcatgttagacacattccctgggtttctgtggtgctctctgaagtttgagagccaccacctaaaagtctgaaaaagcttcaccaacccctaagtcagagggtgccagatcaggctgtacctcagaaccccaggggagctttatttttatttttatttttttgagacggagccttggtttatcacccaggctggagtgcagtggcgcaatctcggctcactgcaacctccgcctcccgggttcacgccattctgctgcctcagcctcgtgagtagctgggactacaggcgcccgccaccacgcccggctaatagtttttgtatttttagtagagatggggtttcgccgtgttagccaggatgatcttgatctcctgaccttgtgatccacccgcctcggcctcccaaagtgctgggattacaggcgtgagacaccgagcccagcctatttttatttttgagacagggtttcgctccgtcatccgggctggagtgcggtggtgtgttcacggctcagtgcagcctgaatcttctgggatcaagccattctcccacctcagactccgagtagctgggaccacaggtgtgcaccaccatgcccagctaatttttcttttttttgcagagacactatcttgctatgttgcccaggctggtctcaaactcctggattcaagttatcctcccgcctcagcctcctaaagtgctgggattataggggtgagccacctcacctggcctcccaggggagctttttttttttttttttttttttaatcagagacagggtctcactatgttgtcttaaactcctggacttaagtgatccgcccacctcggcctcccaaagttctgggactactacaggcatgagccactgcgcctgggagctttaaaccacacataaaaccattgctaagttgtcccaacctcctgaagtgttttggaaaatagggtgtttagagccacaccttttgttttgtatccaaaatagcattcctgttcctgtatgtagcttgttgctttgcttcccagattagcaccaaatgactccagttactttatttatttatttttaattttagttttattttatttttgagatagagtctcgctctgtcgcccaggctggagtgcagtggcgtgatcttggctcactgcaacctctgcctcccgggttgaagcgattcttctgcctcagccttctgagtagctaggactataggcacatgccaccacgcctggctaatttttgtatttttagtagacacagggttttgccatattggctcggctggtctcgaactcctgacctcaggtgatccacctgccttggcctcccaaggtgctgggattacaggtgtgagccactgtgcccagctgactccagttatttctaaaggtcaggccatcttacaaaagaatgaggatatgcttccttggagggatatgctgcagactagggctttttaccagccagagcattttaaaaacaagtgtctgatctcctctggggtgtctgctttggataagtgcagtctgtcttcagtcttgctaagtggtgagacagtgaggtaggaagagatggtaagggcccagatcctagcttctgtcattctggggccaggcagggctctttgagcctcagtttcctcatttgtaaaaatgggacagtaggccctactttgacaggtggttgcaaggaacatgccaagtgcttggcatgggataaatgatatcactcttattatcatcattattatttttgagacaagattgcccaggctggagtacagtggcacgatcataggtcactgcagcctcgaactcttgggcacaagtggtcctctcccgtcaacctcctgagtagctggtactacaggcatatagcaccatgcccagctaattgttattttttttgtagagagagggtcttgctatgctgcccaggctggagtgtagtcacgtgatcacagctcactgcagccttgaactcctgggtttaagtgaaccctggcctaagactcccaggttgctgggattacaggcacacgccatcacacccagttatgttgtcaatgttatcaatactttaaaggcacacttgtctgctttctacactgttgccggagaagggtcataaagtgaagtttggcagaaaagtttggccattgtctagtactgagaatgtgtggaagtgaggaaaggggccagtatattacacatctatggtgagtagttgtgtcatcattaaaggcatttgaagagttgccttttgatgggtccatgctatgggataaaggttacatgttaggaatcctggccttttgtcatgagctctagcagtgttcaagtatggaaaactttagtcactttactggagcctcttcttttatttacttacatattgattttctgtatacaattttgtgtccttaaaactttttttatgtgtgaaatatgacacatagtaacatatacaataaacacctgtttcaccaggcaggtataccatacattgtattactgtatgcctgtcaagagcccagtgttcacagtgttaaaaatataactcccatgtagtaagtacttatcatatctttatttaattatgagggaaccagctagagattaaaactggggaatatgagaggcagaggtaaatgctagtctgtgaaagaaagtgctggggccgggcgaggtggctcatatctgtaaccccagcactttgggaggccgaagcgggcagatcacctgaggtctggagttcaagaccagcctggccagcatggtgaaaccctgtctctactaaaaatacaaaaattagccaggtgtggtggtgcacacctgtagtcccagttacttgggaagctgaggcaggacaattgcttgaacccgggaagtggaggttgcagtgagctgagactacaccactgcactccagcctgggcaacagagcaagactccgtctcaaaaataaaaaaaaaaaaaggaaaaaagagagtactggatacatttagctacagaaatggttaagggcctaccattagttacacattggctattgtcctacaggaaaataaaaccataaactttgaagatatctttgctgcaggcagaaatgctttgcatctcagttggccagaaataatgagcattttatactctgtaatgagcttcagtctttagagtctgggcctaatcaatagtaaatagtcaaacaaagttttgtccccagagtaaaatactctgaaggcaggtttgttggacaatcctctagtttgattttgaaagcatgtatttttcattataattttagtatgtaattatgtattcttaaacactatagttttgcttttcctgattttgaacacagagtaattttgtgtatcttgcttctcttacacaccattgggtttaaagattcatccatatgtttgtgtgtagcggtagtacatcctttttcattgctatatagtattccattgtttgtttataccacattttattgattctgttgctggtggacatttgtactgtttccagttgctatggacatttttgtacatatctcctgaggtctatgtacattggaactgctgcatcttagaatgtgtgctccttgggccgggccgtggtggttcacacctgtaatcccagcactttgggagaccgaagtgggtggatcatgaggtcaagagatcaagaccatcctggctaacacagtgaaaccccgtctcaactaaaaatacaaaaaattagccgggtgtggtggcgcactcggtggcgcaatcccagctgctctggaggctgaggcaggagaatcactgaacctgggaggcagaggatgcagtgagttgagatcgcaccactgcattccagcctgggcgacagagtgagactccatctcaaaaaaaaaaaaaaaaaaaagtgtgctccttcaactttacgagataatgcggaactattttccaagtggctgcactgatttaccctcccaccagcagagatgagtttcatttgctccatgtgctcagatatgttcactttagcattttgatcgtgtagagtgtgatagccgatggttttagattgcatttctgtgattactaatgaagttgagtacagacttttgtttgttttaaaaataaaatactggggcatggtgggctcacgcctgtatcctaacagtttgggaggctgtggtgggaggattgcttgaggccaggagtttaagacttgcctgggcaacatagcaagataccatctctacaaaaaaaagaaagaaaattagccgtgcatggtggcatccacctgtagtcccagctactcgagcggctgaggtggtaagattgcttgagcccaggagtttgaggctgcagtgagccatgatcacgccaccgcactccagccttggtgacagagcgagaccctgtctctaaaaaataaataaataaaatattgtgagtctctgatggggagcagtattgcatggtggttgagaactgaggctctgatgttagaactggattctgacttaacccactgtttgcccacatcttgagccttggtttccctatctgtaaaatggcagtattctcgggctggctgaggaaaggaaatgaggccaggcgcggtggctcaggcctgtaatcccagcactttggcaggctgaggcaggtggatgatttgaggccaggagtttgagatcagcctgaccaacatggcaaacccccgcgtccactaaaaatagaaaaaaatagctgggcatggtggtgcacccctgtagtctcagctacttgggagacagaagcaggagaattggttgaacttggaaggtggaggttgcagtgagctgagatcgcaccactgcactccatcctgggcgacagagcaagactgtctcaaaataaataaataaataaataaataaagttaaaaaagaaaaggaaatgagtaatgcatgtaagggcacccaaaaaaagaccctagctggtgagctgatgattccacccagagcctgctgttccctcgttcactgtgatgtataatcatgtgaggagcaccgtatggagagtcagacttttattttccaccacagttgggagagcaggggggtcagaaaacagaacatcagctagcagagctttgtcatggaccctaacttgtcatcctggagtcccagctagtagggtcctggctgagtcgggagggtccttaggcctggacccctgaacccacatgtacttggacctcatgggcacaggtagagtgtggcctgtgtccacagaggcccaggacagcttccaggctgggggctgtgctgacatgtctgggcttagggcgctcctcactcagggctctctgaaggccagaactttgcagagcttggagcagggatgagccaggcccttggaagctgggaaatgtttccttgccttctgaatgtgctaacatccccctcatgtgcctatttgcttaacaaaccagtaggtgggtcaggaaagtaataacacaatttcctcatttgctggcgaggggaaggagaggaagctgagggtttggaaattttatccaagtgggcccaggctggaaggagctgagcctcactttttctcagcccatttagccgctctgtgccgcctgtcctgagttgcatgcctggtgtccctctctctcgagttagggtgactttctgattatcattcttgttgagagtgaaaaggggtgcattgaaatttatccctgagcagcagacatgaactgggacttgggcgtgtggtcaccctgctccacacctgttctcaggaaagggcctgtctagctgtgattttgtccttgtgtcaccagccttggctgttactgagcaatgaaagctctgcctcgggaagtcatttaatttctgagcctcatgttcctcttctggaagatgggaatgaaagtgtgcgtgtccggcccattttttagggcaatgattgtcagggtatgaagagcttggtcaagctgtgtgaagagctgtacagctgcagaggttgttaacattgatagagccacccaggaagggtgtcctgggttcaggcagctactcctccagccgtcgggtcagccagccgtaactttagatacacttatccatgtgtaatgactttttaagaagcaagatcagtttccccagccctttatgggaatacccatgtgtccatacttgctttcagcttagagtttgctcaggttcctagagctggtcagggtttgcaggaccgcctgggagcagatggtaccatggccttatttacagatgaggaaactgagacccagaggggaaagtgactcccaaggtcatgtaggtaagcatacggctcccctaaggatgaggcattggtctggtgacagtgcagcccatcataagggactgagcctgtggggtccagacctgctctcctcccagaggaaaaggctccctgtcaccccatcgctaatgcagatagcgtcatgtccagggaagctgtcacacattcatctgggcccccaacatcaaggacacctgtccctgcaggccccctgctggcaccttcggggcccagggcaggcccctgtccattccgtgtctgcacttccctccctggtcacaggttctcaggggcaggctcttttccttagcagaaaggaaacaagggaagctgacctttcccacctcagaacaaaagttggaagggcaggtgcctcgtgagcctggaggcctcaggaggggtgtccccttcccttgtgccctccccgccaccaacaccagtggacagggatcactaagagagtggggctcgggagactcaccttctgcgctgggtctgtgagaacatcacctggagtgcccctcccagcggatgctggggtcggttggattttcagcctggccagggttggctgcctcacctcaggaacaggcttagcctgtgctgccacgtgggtgccggtccttgctctggcctgaagggagggggccgggaaaggagggactgatcctgacccaaacccctaagtaaactgccctctgcgtccagactggactccccccagactctgtccaggcccttaccactgccctccctgtgcccccagcccgggctgcaggaactattggctgttcagccagcaggagcagcaaccatgcaggtgtttccagctgttaacgtgtaagccctgcctggccacgtgcttgctcttgccttttgtgcacagccagtgccaagggggagaggaggcagcagagacgttgtgcggaggggatgcccaaaggggactgcccaggctgggacagccctgatggggcaggggcgttccaggaaacagcaggttttgcctctcctcctcttcccaccccactactcccaccccattttcccggatcaggaaaaggcaggccagcattctagggaacaggaagtgaagttggcttccagctaggtgcctgccagggcctggaggaaattcctgcaggcctgagcccgtctgggaaggaccagtttctctccttgtcctggtgtcctgctttctgagtttcccctgagggtgggggagagctgtcactctcttcactctatgtcccgcttcctcccccatcctcatggagcactcaaaccctgaaccctcacacctttctatggttgtacccgtccccaccagtttcctctctggaaagtgaagaggaggctgggcacggtggctcacggctgtaatcccagcactttgggaggccgaggtgggcagatcacaaggtcaagaagttcaagaccagcctggccaacatggtaaaagcctgtctctactaaaaatacaaaaattagccgggcgtggtggcagttgcctataatcccagctactcaggaggctgaggcaggagcatcacttgaacccgggaggcagagggtgcagtaagccgagactgtgtcactgcactccagcctgggcgacagagcgagactccatctcaaaaaaaaaaaagaaagaaaagtgaagaggatagagcccactaggggtcatcaaggtgtgggacaggcagcatgttcctacaggaagaaaactctaactcctggttctggttctttttcatctcattcattcattcattcattcattcattcatttgttttgagatggactcactctgtctcccaggctggagtacagtggctcgatctcagctcactgcaatctccgtctcctgggttcaagtgattctcatgactcggcttcccaagtagctgggattacaggtgcccaccaccatgcctgattaagttttgtattttcagtagagacagggtttcactgtgttggccaggctagtcttgaactcctgacttcaagcaatctgccaacctcgacctcccaaagtgctgggattaaaggtgtgagccaccgcacctggccatctcatactttcacaattcattctttggtgcaagttttacaatatacattctatatttgtcaagtgataacttccatgtaacttataaaatacacataattcaggaagattgtgctaaaatacatttaaccaataggagtatgccgtcagaatattttggcaaacaagggtcactaagttttttctgtaaagggccaggtaggaggtatctcaggctttgtggccatatggcctctgtggcagcagctcagttctgcagttctgccatgaaagcagccacagataagaggtaattgagtgggtgtggctgtgttccaataaaactttatttctggaggctgaaatttgaatttcagagaaatttcatgtgtcatgaaatattattcctcttttggttcttcttccccccctccaccgccccctgccaagcattaaagaatgtggaacccgttcttagcagccggctgtgggctggatttggtccatggaccatagattcccagcttctgctctagaccacccgttctcagacttgaagcctgcttcagacttacctggagagcttttttccaaaatgcatattccagaaccccagccctgattttgtagattttctggaaggccccagaacccgcattctaacaaggagcccagttgagtcagacacaggtagtctggagtccacttttttttaaacagagtctcagtctgttgcccaggatgcagtgcaatggcgtgatcttggctcactgcgacctccgcctccaaggttcaagcaattctcgtgcctcagccttccgagtagctgggatcacaggtgcctgccatcatgcccagctaatttttgtattttcagtagagacggcatttcaccatgttggccaggctggtctcaaactcctgacctcaggtgatccaccagcctcagcctcccaaagtgctgggattacaggcgtgagtcaccgcgcccggccaggagaccacatgttaagaagcaaagctcaagggtctccaggatcctggtctgttctcttcagccagtcctgaggcctggggtgtgcagtgctgtgggagacccctgcatcagaataactggctccttcactaccttccaggagcttccatccagtgggggtgggggacaccacccgccaacagcacagcccagtcccaggtgctatggaagccctgggttcagcctggagccagggccagcgtcccgaggatgaggtgccgagatggaccttgaaggatgagagaagcctggactgcccttgagtggcgagggtgggctgcctccaggttgaccttaatcccttccctccctaccaccatgtgtccagatgaccttgggcaggtcccttagcctctctggatatcgggatatgacattgactacctcagagacttgtggggaggattcggcgagctgatatgcatgaagtgtatcaactagggctgctggctggtatctccttcccttgtcttcccccaccaccccagccaggggacagggtgctgctgagggagtgggctgggagagtcacttctggccttgtcttagggatctgagaacagggcatgggccccgtgtctgggagtgccctggtgcccttcctagtggggttgggcgtggtcagtctggccagggctggctccctcccccataaataggctcacctggaggtcttttcccatttgaggcaatgagatatgtatgtgaggctttatgacttgtcttttttttttcattttgagacagagtcacggagtctcactctgtcacccaggctggagtatagtggcatgatcttggctcaccgcaacctctgcctcccaggttcaagctatccttttgcctcagcctcccgcgtagctgggattataggcgcccgtcaccacacccagctaatttttgtagttttagtagagacagggtttcaccaagttggccaggctggtctcgaactcctgacctcaagtgacccacccaccttggcctcccaaagttctgggattacaggcgtgatccaccgtgctcggcctcaccacccgcctttcttgtggtgtagttcttgctgcctcaagaactacatatatcaggcctcaaaacccacctgatatatgcgtgcctgggaatagggaccttgacttttcccctgtcccatatgggcccaggggccggttctgggctggcccaggtggggctagagcagctggatccaggcacatgagatgtgaaagtgtgggccttacgccgcatggagcggctggaggaaggagagagggagcaagggtgccgcagggtcagattgccacagggccagggtgccacagggtcagggtagggccagggtgccatagggtcagagtagggccagggtgccacagggtcagggtagggccagggtgccgctgggccagggtgccgcaggatctggttgccacagggtcagggtgccgcaagcacaaggagtcacccgtgattctccagggtctggctcttgggctgagatccaggagaccttggcaggcctgtctttgggagtctggcacagccccagaaggccatctggacagttttcagacctgagaggaggaaagggcttgtgtctggagaaggtgccatgggggatgggaggtggaggaagcctggggccaatcaggatctggatctagcagggaacaccgaggccggtgttctcgtcccaccatgggactcagcctgaagaagacaaggtgaatgaacgaccatttctctctaactcagttggctaagaggactgagctggcgccgaggctctggacacaaatgggccagttgaccctgaggtttctttctggtagtggaggtggggcttcctctggctgaccctgcttaggtctctgatggaggtagcaggggctctggttcccccaaactggccaagtcctccaccatagcacccaaggggtctgggcagagtgcagcttccctcccctccccagcttggcttggtgggcacctgcctcccctgccctcctgaccttgatggctaatgcagccagccccaggcaggcacagtcacagccctcaaacaacatgaggcccaactcaagactcctgggtggtggtggtcaaggtgggggactctgtagccagtagagcactgtgggggcaagagactgacttgaaggcttggagcctcacatgcccgcctagtggggtggtcctgagggatatgacttctttgggcctctctgctcatttttggaacctgacccgagaaggagcccatccaagacaatgtcccgccctcagggagggtctggcagtttttatccctaaaggctgggattctcagcggagcatcctaggctgtagtacccacgacatcttgcacacaagaggtggaatcgcctgttgatgaagagcaaggctctggaatctgtgatcttgggccactcacttcacttatcaatcccttcgcttccttcttgcctgttacatggggtctgcaatctacccctcaggggcgctgacgagctcacatgagcctgtgacataaaacacctagcacggccctggcgcagtaagagctcaggaaacgggctgctgctgtggttactgtggacccaggcggaaacagagcagccccgcccctgccgcaggcatataaaagtgaccacttggccggtcacggtggctcacgcctgtaatcccagcactttgggaggccgaggcgggtggatcacctgaggtcaggagtttgagaccagcctggtcaacatgatgaaaccctgtctctattaaaatacaaaaaattagctgggcgtagtggcaggcgcctgtaatcccagccgcccaggaggctgaggcaggagaatcacttgaaccctggaggtggaggttgcggtgagctgagatcgtaccattgcactccagcctgggcgacagagccaaactccgtctcgaaaaaaaaaaaaaaagaaaagggaccactcactttggtctgattcttcagttctcatggtccttttacatcggtcatttcattgcattctccaacagtgtctgagggagactggtgtctcattttgcagaggtgaaaactgaggcttggcaagattaggtagcttgtccaaggacacacagctggtgcttccagagcgagacctggctttctgtacccaaagctcttgggtagtctctcccatcctgggatcttgagggtcacgggaaggaactgggtggtttgcagtgggacccttcacctagtgccttctgaccttgcagataaaataccatgaggagtttgagaagagccgcatgggccctagcgggggcgagggcatggagccagagcgtcgggattcacaggacggcagcagctaccggcggcccctggagcagcagcagcctcaccacatcccgaccagtgccccgggtgagtgcaggtcctgttggtgcagatgacctgaggcgaggccagtggggtggggaggaagccaggagaagacagacagacagatacaccttccggagccttgctcttaatcaacaggcgattatgcctcttgtgtgcaagaggggaccagaggacctgaggccgggccagctggggtggggaggaagtcggcgagagacagacacacacacacacacacacacacacacacacacacatgcacgcacgcatgcaggcgaggaaaagactgcttcccaagaccccaagttccattctcatccagaatgaggacgtgagcaccagggtcaggcctgtactgggccaagaggattgaaaggagaggcccccaggtcatggggctcagagcccctgcgtgggatacaacacacaggcaaatgtgcacacgtggacatcagcctttgagctgtggggcttgagccaggttgggggcggggtggaagtgcatggtatggacttctcgggagctctgggaggggctgggtttggcaggacagtttccaagccctgtctcctcccatcttccagtttaccagcagccccagcagcagccggtggcccagtcctatggtggctacaaggagcctgcagccccagtctccatacagcgcagcgccccaggtggtggcggggtgagtaaccctggccggaggggagaggccagaggcagggggtccttcgggaaggcttggacacagctcatggattctcctgacctttgcacccaccctctgttgtgtgtgatgataaggatctcagccttgtgagcagagaggaaattggttggcgtagtgggcagaggctggctgggactggggccctgcgttccagccctggtgtaccatgggcaggttgctcaccctgctttgggtggggtttccttaccccagctacctgggaacacacaaggcaactttctgcatggggccttccagcactgggcgctgctctcctcgcttcatgaggatggcccccacatccttcagctctcaggctgcccctgcctctgaggggcctccccagccatgtcgtgtaaagcgcatcaccctgatgctttgcatcactcgactccgctggctgccttcagagcactttttccaactaaaaagagctcttcgtgttggtcaccttctctgtgtcccctgctgggctggggaccctggcagcgtccgtctggttcacctactctgagccaggcctagagcaagtgaataagcccagcaggaatggggtgagatcaggcttcctgagccctcagagctgaagtcccggctctgtaagtcctgccactcactccacccatgggtgccgctgagccacccttaccaagctcctggcaggctcagcgcctccaggctgggtgcctgggaattcaaagtagctcacgtaggagcagaacagatacttagagagataaaatcgcctgagataatggctggctggagtctgatgctctgggcacacaaacaaagggatgttaggactgcccagggcactgtgggcgcaagagttagtctgaagtataaggttccaggcagcccagccagtccctccctcctcaatgggtctgtcctggatgtgtagggtccatctctgaatataaagccacctctctgccctctgggggcttacattccagtcagggggacaaacaagaaaacaataagaaaataggtgtataacataaggtcagcggtgacacgctgtgaagagaaagacagcagggtgagggatggatagaaagcagctggattaagacatttggccgggggtggtggctcacgcctgtaatcccagcactttgggaggccaaggcgggcaggtcacttgaggtcaggagttcgagatcagcctggccaacatggtgaaaccccctgtctaccaaaaatacaaaaattagccaggtgtggtggtgtatgcctgtaacctgtaatcccagctactcgggaggctgaggcagtagaattgcttgaacccgagaggcagaggttgcagtgagccaagattgcactattgcactccagcctgggtgacagagcaatatctccaaagaaaaaagacatttggccgggtgcgatggctcacacctgtaatcccagcactttgggaggccaaagtgggcagatcacctgaggtcaggagttcgaaaccagcctggccaacatggtgaaaccctgtctctactaaaaatataaaattagctcggcatggtggtgcatgttcataatcccagctactcgggaggctgaggcaggagaattgcttgaacctgggaggtggaggttgcagtgagccgagatcacgccatttgcactccagcctgggcagcaagagcaaaactccagctagaaaaaaaaaaagaaaaaaaagacgtgacatttgagcaaagtcctcaataaaggaaggagtgagccgtgcaacgaggacaggaagtgcaaaggctctgaggcaggaatattctaggaaagttcagggagcagcaggaagcccgaattgactagagtgggagagggtgggaggtccgattatgcagggacttgtgggccccaggaaggcctctgtgacctgtgatctgtgcagagcgacataggtttttggaagaccaccctggcagctgtgttgagaagaggcagtggtttgagggtagaagcagggagaccgtcaggaggctgttgcaggatataggcatggatgggagtggctcagcccaagatagaggcagaattggtgatgagagagactgaggttacttcatgggaggtgtgacttcttatcccatagacctgttggtttcaaactgtcctgtggagcctcagagaccagtcaagggcagtgaaggtcaggggaggtagaatgttgtctatagctataggatttatttttcttttttttttcctctttctttttttaaactccatcctggtagtaggtggcgctgtaggtttttgtgtgccttactgaacattacctagatctagggcttaagcggcagattttggctgaggcttggaaggtggaacctgatagactcgtcttctgtcctctgaagatttttctcccaaggaaagatctttgtcctgaacttggacaggactcatcatggcttctaaaagaaactactggtgcttataatcatacaaataatagcatacagggcatgttttttctgttttttttttcttttttgagacagggtcttgctctgctgcccaggctggagtgcagcagtggtgcaatcacagctagctcactgcagccttaacctcctgggttgaagccatcctcccacctcagcctcctgagtagctgagactacaggcatgtaccactaagcctaactaattttttattttttgttgagatgggctcacgctagtactttgggaggccgaggcgagcggatcacttgagaccaggagtttgagaccatcgtagccaacatgatgaaaccctgtctctacaaaaaagtacaaaaattagccgggcatggtggtacacgcttatagtcccagctacttgggaggctgaggcaggagaatcgcttgaacccgggaggcggatgttgcagtgagccaagatcacaccattgcactccagcttgggtgacaaagcaagactccatctcaaaaaaaaaaaaaaaaagagggagttggggggtcttactgtgtttcccaggctgatttcaaacttctgggctcaagcagttctcctgccttggcctcccacagtgctgggattacaggcgtgagccactgcacctggcctgcatgtcgtatttttagacattactctgtcatcatggctggtggaccttactgcagtcctgttcagggaggtggggcagagctgatgtgacccggtccctgctctgcctctggcccttagtagctgccaaaggttgtaaaagatcgattgctctcagaaagcaagacacagaggttaagaatctttgcagcagagcctggtgctccatttctgagttcactgctcccccaggctctgctccagggtcgtggagagttagaaaaaaatgctcagacccaggtgagccggcatgcagggccctaggctgaccacacttcccccacagaagcggtaccgcgcggtgtatgactacagcgccgccgacgaggacgaggtctccttccaggacggggacaccatcgtcaacgtgcagcagatcgacgacggctggatgtacgggacggtggagcgcaccggcgacacggggatgctgccggccaactacgtggaggccatctgaacccgcagcgcccccatctgtcttcagcacattccacggcatcgcatccgtcctgggcgtgacccgtccattcttcagtgtctctgttttttaaaacctgcgacagcttgtgattcctacccctcttccagcttcttttgccaactgaagccttcttctgccacttctgcgggctccctcctctggcaggcttcccccttgatcgacttcttggttttctctctggatggaacgggcatgggcctctctgggggaggcagggctggaatgggagacctgttggcctgtgggcctcacctgcccctctgttctctcccctcacatcctcctgcccagctcctcacatacccacacattccagggctggggtgagcctgactgccaggaccccaggtcaggggctccctacattccccagagtgggatccacttcttggttcctgggatggcgatggggactctgccgctgtgtagggaccagtgggatgggctctacctctctttctcaaagagggggctctgcccacctggggtctctctccctacctccctcctcaggggcaacaacaggagaatggggttcctgctgtggggcgaattcatcccctccccgcgcgttccttcgcacactgtgattttgccctcctgcccacgcagacctgcagcgggcaaagagctcccgaggaagcacagcttgggtcaggttcttgcctttcttaattttagggacagctaccggaaggaggggaacaaggagttctcttccgcagcccctttccccacgcccacccccagtctccagggacccttgcctgcctcctaggctggaagccatggtcccgaagtgtagggcaagggtgcctcaggaccttttggtcttcagcctccctcagcccccaggatctgggttaggtggccgctcctccctgctcctcatgggaagatgtctcagagccttccatgacctcccctccccagcccaatgccaagtggacttggagctgcacaaagtcagcagggaccactaaatctccaagacctggtgtgcggaggcaggagcatgtatgtctgcaggtgtctgacacgcaagtgtgtgagtgtgagtgtgagagatggggcgggggtgtgtctgtaggtgtctctgggcctgtgtgtgggtggggttatgtgagggtatgaagagctgtcttcccctgagagtttcctcagaacccacagtgagaggggagggctcctggggcagagaagttccttaggttttctttggaatgaaattcctccttccccccatctctgagtggaggaagcccaccaatctgccctttgcagtgtgcagggtggaaggtaagaggttggtgtggagttggggctgccatagggtctgcagcctgctggggctaagcggtggaggaaggctctgtcactccaggcatatgtttccccatctctgtctggggctacagaatagggtggcagaagtgtcaccctgtgggtgtctccctcgggggctcttcccctagacctccccctcacttacataaagctcccttgaagcaagaaagagggtcccagggctgcaaaactggaagcacagcctcggggatggggagggaaagacggtgctatatccagttcctgctctctgctcatgggtggctgtgacaaccctggcctcacttgattcatctctggttttcttgccaccctctgggagtccccatcccattttcatcctgagcccaaccaggccctgccattggcctcttgtcccttggcacacttgtacccacaggtgaggggcaggacctgaaggtattggcctgttcaacaatcagtcatcatgggtgtttttgtcaactgcttgttaattgatttggggatgtttgccccgaatgagaggttgaggaaaagactgtgggtggggaggccctgcctgacccatcccttttcctttctggccccagcctaggtggaggcaagtggaatatcttatattgggcgatttgggggctcggggaggcagagaatctcttgggagtcttgggtggcgctggtgcattctgtttcctcttgatctcaaagcacaatgtggatttggggaccaaaggtcagggacacatccccttagaggacctgagtttgggagagtggtgagtggaagggaggagcagcaagaagcagcctgttttcactcagcttaattctccttcccagataaggcaagccagtcatggaatcttgctgcaggccctccctctactcttcctgtcctaaaaataggggccgttttcttacacacccccagagagaggagggactgtcacactggtgctgagtgaccgggggctgctgggcgtctgttctttaccaaaaccatccatccctagaagagcacagagccctgaggggctgggctgggctgggctgagcccctggtcttctctacagttcacagaggtctttcagctcatttaatcccaggaaagaggcatcaaagctagaatgtgaatataacttttgtggaccaatactaagaataacaagaagcccagtggtgaggaaagtgcgttctcccagcactgcctcctgttttctccctctcatgtccctccagggaaaatgactttattgcttaatttctgcctttcccccctcacacatgcacttttgggcctttttttatagctggaaaaaacaaaataccaccctacaaacctgtatttaaaaagaaacagaaatgaccacgtgaaatttgcctctgtccaaacatttcatccgtgtgtatgtgtatgtgtgtgagtgtgtgaagccgccagttcatctttttatatggggttgttgtctcattttggtctgttttggtcccctccctcgtgggcttgtgctcgggatcaaacctttctggcctgttatgattctgaacatttgacttgaaccacaagtgaatctttctcctggtgactcaaataaaagtataatttttacctgcggacttggtttcctctctggctctgagctgctgttgtgtgtgtctgtgtgtgggtgtgtgtctctagctgtaaggtgctgctgtgtgtgtgtgtgtctagctgtaaggtgccactgtgtgtgtgtgtgtgtgtgtgtcctgtctgcttgggggcactggcctgtggccctcctgggacctctgctgcccctcggggagagaatgacttgtctggatgccaagggggagtttgctgctgtctgtcaggcccttggcccctacttcctccttgctgagaactccccaccaacctacttctggctttccacccgctcattcctctctgcccaacttggtgatgctcccggaagcttccctgagctccgtctcgtattactgtgtcacttcctcagtgacatatctgtctccccactagccagagcccttggggcaggtgatgagtctaattcatctctaaatcccgggtacctgcccaggagcggtgcggagctgttgaattaatgaatgagcttggctggggagcagttctagcactctgccgctgccaggcagagagcaggagctccacgcatttgaggaacgagatgacagggcattccacagtgggacgggacctggataaagctgtctgtaaggtggcctggcaacccaaagcactattcacagtgccttctgaatgtaatctttaatacacatcccctttcttccttcttcctcacaaccctgtgagagaagtaactacttatagaggggctcactgaaacccagaaaggcaaagcagattggtggcagtcacagctagtggcagagtggggcctgagacccccatgtgatgctcacagtctggtgctgtgccacccggccatggcaggccgcgtgcctgtgtctgtggcagctcttagatgtgtgtctcctgggctccatgttttgctccaggtgcccagggtctgtgactggccagaaggccaggcggcctcccctcttgctcattgggcttgggaagaggacagtggtagagaggggaatctggccctgctcagtgctgccaatcagcctcaggtccagctgcttgaggggcatttctctcttggggctcagaactaaggaattctccagcctcagaatcacagcagggtggagaggaggagggctctcctgagctgagcatttgtaatctggagaatgacatggccagagtcagctgagctggggcaatgtggggagcatccaaggctgccctgggtggtataattagagacagcactgacacctgctcccctccaggggtgcaggcagcccaatactttcccaatagaagggaattagttggcaaagcttgcctcatgtcggcctgccccactccccgggaggcttcattcaccttcagatctatttgatggaacagtgctttgggggacattgctgccaagtctccactccctgctcacagaaagctctgcctcctggaaatgggccaatgggaggagtttctggatttccttctggcagtggcctaagttcctgaggtcttgcattatgagggggttaccaatatatcttaaccccaggcctttaaaaaaaatattatttggggtgggggccaaggagactaggcctcagagacgtcctagggaatgatttaatttaatagaaaataattgaggcttataaaaaggcacaaaaatcctggctaacacagtgaaaccccgtctatactaaaaatacaaaaaataagctgggcgcggtggcgggtgcctgtagtcccagctactcgggaggctgaggcaggagaatggcgtgaacccgggaggcagagcttgcactgagctgagatcgtgccactgcactccagcctgggtgacagagcaagactccgtctaagaataaataaataaataaataaataaataaataaataaataaataaaaagaataaaataattctcttttccccctcagaagaaaccacttgaattttttaaatttcagggatacccctggggaattcttcagtgtcctctctgtgtacaacactatgctgagcttttggaagaggataccaaagaaaacaaaactaggccgggtgcggtggttcacacctgcaatcccagcactttgggaggctgaggtgggaggatcgcttgagtccaggagtttgagaccagcctgggcaaaatggcaagaccccgtctctataaaaaaagaaagaaggaaaacaaaacagtgggtaatgactgcaaagagacgaaggagtgggtggaggaggggtctctggtgctcgtcctgtaggtggatcgatgtgaaagcagtccactgcaagctgagcagtgcacgtggggtgtaggggccttccggaccaacagggggagcagtgtggcgcaagaggaagaatatggactttggtgtcagcatgcctagttttgaatcctggtctctgacatttttaattaattaattaattattttgagacggagtttcactcttgttgcccaggctggagtgcaatggcacaatctcagctcactgcaacctccacctcccaggttcaagcgattctcctgcctcagcctcctgagtagctgggattacaggcatgtgccaccatgcccagctaattttgtatttttagtagagctggagtttctccatgttggtcaggctggtcttgaactcctgacctcaggtgattcacctacctcagcctcccaaagtgttgggattacaggcatgagccaccacacccagccttttactttttattttatttattaatttatttatttttgagacggagtctcgctctgtcacccaggctggagtgcaatggcacggtctcagctcactgcgacctctgcctgccgggttcaagcaattctttagcctcagcctcttgaatagctgggataacaggcacctgccaccacgcccggctaatttttatttttattttttttttgagacagaatcttgctctgtagcccaggctggggtgcagtggcgcgatctcagctctgcctcccgggttcaagcaattctctgcctcagcctcccaagtagctgggattacaggcatgcaccaccaagcctggctaacttttgtatttttagtagagacagggtttcaccatcttggccaggctggtcttgaactcctgaccttgtgatccacctgcctcggcctcccaaagtgctgggattataggcatgagccactgcgcccggctggtctctgacacatctaagctatgaaccattagggtaagtttctgaccatctctgagccccatctatgaaagactcatagggaggttgaaattgcaccacatgtacgatatctggcccagtgtaggaaatgtataaatgttagcttcatccctcagggaagcccactgagatccacacgaaacttttgtctgtgtctccccataatgtgacctttagaagttgccaatggcccacccaatacccaaccatgatttttctgagataatctgcccgaggtgtgtgagaggaaacgcgaagaaggcagtcaggaggattcactcttgggggagctgggtaggatcctatctcctcctacatccagagcatgcaggctccatttagatacaaaggggtgggattgggttcctggggagaaattgagcccctttgattctgcggttctgtgggtctaaatctggcatctccttggctatccacccccaggctttgtgattggttggctgtggttggtgggggggcaggaagctgctggtggagctgcagcatccttcagtctcaggcccctgggagggggaggggaaagaaccagggctgagctgtggagtgaaggggagccatttctctccaccgactgcaacctccgtgctcacagctcacggttcaccagaatccaggggcttggtcggcctaggaatccacaatgctggatattttcatcctgatgttctttgccatcataggcctggtcattctgtcctacattatctatctgctctagtggcctggagctgcggccggagcctgctggagaacagctcagaaggaaggatggagatgaatggccgagtgccctgcttgctgacgcaccggtggatttttgcttctgctgttatctcgggtattgattccaaaaaaaaaagaaaagaaaaaaagaaagagtttgctttcctattttttttcttagaccactctgaaaagaataagaaatgccagcttctttctttgggacctaatttaaaataagactttaaaaattacaaataaaatccacaatgtaaacgatttttaggcagaacgggttgggaatgatggatgtggtggggagggactattatttcctaatttcttcttcaagttaggtgctcaaactcaagttgtctattttcttctggtaattaaaggtaaaacacatctttgcatgtcagcatacttgcaatatagttgtttacaactatgcttgtataattgcattacttaatgattgactcattcttatttgagggtgagacggcaaataaattttacttggggtggggttttcggggagatgtccaactgtgggatatggtggagaggagggaggaactcctggtactttgcagttgtccccatctgagactttttatttctgggtttcttacagctcctggtctctccagtccaacaagaggcctctcatccacagaagcagtcctactgcccagcagacctctttcagagccttccagacatggctgacccctggcaagcaaggggctttttgagctgagaggcacttggctgggacttcaggaattcatggacagggctggcagatactgcatatgtttgagctgtagatgggattgagaacagaaagttgaaatggagacttattaaagttaccgtggagaactgctcaaaaattcattttgaattaaggaaacttaaattcattttaagtttccttagatctaaatgcaactgcacattacactcaaatatgttccttccttctcacacacaggactcccttgtgaaactcaaggggaagttcaagttgtccatcttcatctatgaagtagtcactttatcactgtctttacagattgcacagtctggggttttgtggtttctcttgtctcactctccagccaggaagaacttgtcatttgagtttttaaaatgtatcatttcttccccacctcaaaccacttgtatcccagtttctcatttaaagggagaaatggttatatagtcctctctttgcacctgattgaattataaatgatagaaacaagatggctatacttatttaggaaaaatctcttaccccaaaatgagtgtgtgtgtgtgtgtgtgtgtgcgtgtgtgtgtgtgtgtgtgttttaatcaaagatcttttctggaaaaaactttccacatagttctctgacccattagagttgaagaaactatgtattttgggattcagagtagaattggcctgcaaatctggggtgtttattccttttacaagtctatcataattgttctacatttaattttcctttcttgcttaaaagtaaacaaggagagtcaggagtggtggctcatgcctgtaatcccagcactctgggaggccgaggcggatggatcacctgaggtcaggagttggagaccagcctggccaacacggtgaaaccccgtctctactaaaaatacaaaaattagtcaggcacagtagtgcgcgcctgtagtcccagctacccgggaggctgaggccgaagaattgcttgaacccgggaggcagaggttgtagtgagccgacatcatgtcactgcactccagcctgggagacatagcgagattccgtctcaaataaaataaaataaataaataaataaacaaggagaaagattagtttttagtaataacattgtgtccaatttccatgttttaaaacaaaaattgaggcattatatgtcacaactgaaatggaaaagttgtgtttaaaaattatggacaaggccgggcacggtggctcacgcctggaatcccagcactttgggaggctcaggcaggaggatcacttgaggtcgggagtttgagaccagtctgaccaacgtggtgaaaccctgtctctactaaaaatacaaaaattagctggtgtggtggcaggtgcctgtaatcccagctactcaggaggctgaggcaggagaatcgcttgaacctgggaggcagaggttgcagtgagccgagatcacacctctgcactccagcctaggtgacacagcaagaccccatctcaaaaaaaaataataataaaaacataaaaattatggacaagaaaaaacactattctggaagctttgttttggcaacaaattatatgacctgacctttcataagtcatttaaactttagggctaggccaggtgctatggcgcatgcctataatcccagcatttagggaagtagaagcaggaggatagcttgaggccaagaattccagaccagcccaggcaatatagcgagacccccgtctccacaaaaataaaaaataaaataaaaataaataaatacataaactttaggtcctctgtttattctgtcaaatgaaagtgttaggccaaggtcgcattatctctttggaaactacatcgagaacagaattcccatggaacgaactcttaatagttcactggtagtcccccttttctgaatattcttcccaacatgacactttataacaaaaatttaactgcaaaactctttttttttcaccaacagccagattttgatgagaaaatggccatatttatttactccaaatatatattatgtctgtgataatttgcctaaactgtttaaggaatattaacaagtatgatactgcatcgtggtatgtagcaaaaagataggtaatctgacatacatggatgcaagcagcatggctgtgaacctggatatatttagaaatgatcttcagtggagtccttgatgtgacattttccactaaaacattcttctaactctggtatatcttagtgtttcgaactataatttccgtcttcaagccaagacagcagctctacatccttacctaggtaattcaggcatgcgccagtattttggaggggtccaaattagagttagttatgatggtatagatctttaaagtatagtctaaccaagcttgctctggtcttttgtgacatcaaggcttctcagtctgtattcacataaagttgaaacaactaatcaattcagtgaaaaaaaatcagcagatttcactcatacactggtgatatataccactggtattgggtacaatgtaaggagagaggattacccatctcttcagttacttgtaaaatatgattttaaaaaaataaatcaatacattttggaaaaattatatgactttgtgcttatatttatgcaacaatatgctagcttataacagggttttactgtgttattttgatagttgtttaaattttacatttaaactatttgtattttggcatcccaaaacataataaaacactgcaaaaagttacctctgtaatataagattttgtataaattttataaatttgtgtcatagggtaattttgtccaataaaatgtcaatgagataaaaaccactctgaagaattataaattacttagaaaaaaatcaagtgacaatgctaagaatcattacactaatacctgctttcttgatgaaaacagggggtttgtggggaagaatgatgtattttatttattttattttttggtttttgagacagagtttcgctcttgtcacccaggctggagtgcaatggcacaatcttggctcactgcaacctccgcctcctgggttcaagcgattctcctgcctcagccttccgagtggctgggagcacaggtgtgcatccccatgcctggctaatttttgtattttttaaagtagagacaggttttcatcatgttggccaggttggtttggaactcctgacctcaggctatctgcctgcctcagcctcccaaagtgctgggattacaggtgtgagccaccgtgcctggccaaaatatcattttgattttaaattactcaaaaataatgggacttttccttaggcatcgaagtacaactgaagtggaaaattgtctttgtaaattacatgctttggctttatcaaactatagatattttcaaagcctagagtggcctcttcttttttttttgttttcttttattattattattatttttttttttattttttattttttattttttattgatcattcttgggtgtttctcgcagagggggatttggcagggtcataggacaatagtggagggaaggtcagcagataaacaagtgaacaaaggtctctggttttcctaggcagaggaccctgcggccttccgcagtgtttgtgtccctgggtacttgagattagggagtggtgatgactcttaacgagcatgctgccttcaagcatctgtttaacaaagcacatcttgcaccgcccttaatccattcaaccctgagtggacacagcacatgtttcagagagcacagggttgggggtaaggtcacagatcaacaggatcccaaggcagaagaatttttcttagtacagaacaaaatgaaaagtctcccatgtctacctctttctagacagacacggcaaccatacgatttctcaatcttttccccacctttcccccctttctattccacaaaaccgccactgtcatcatggcccgttctcaatgagccgctgggcacacctcccagacggggtggtggccgggcagaggggctcctcacttcccagcaggggcggccgggcagaggcgcccctcacctcctggacggggcggctggccgggcagggggttgaccccccctacctccctcccggacagggcggctggccaggcagaggggctcctcacttcccagtaggggcggccgggcagaggcgcccctcacctcccggacggggcggctggccgggtggggggctgacccccccacctccctcccggacggggcggctggccgggcgggggggctgacccccccacctccctcccggacggggtggctgccgggcggagacgctcctcacttcccagacggggtggctgctgggcggaagggctcctcacttctctgacggggcggctgccgggcggaggggctcctcacttctcagacggggcggttgccaggcagagggtctcctcacttctcagacggggcggctgggcagagacgctcctcacctcccagacggggccgtggccgggcagaggcgctcctcacatcccagacggggcggcggggcagaggcgctccccacatctcagacgatgggcggccgggcagagacgctcctcacttcctagatgggatggcggccgggaagaggcgctcctcacttcctagatgggatggccgccgggcagagacgctcctcactttccagactgggcagccaggcagaggggctcctcacatcccagacgatgggcggtagagtggcctcttctaagtcagttttgtgcccatctattttaaacaaaaataaaaccaaagtcatatattaacaggggaacagaaaaagccattgacacaacttccattataaaatcaaacacaccaaggcagatacattagaaatgtttaagaacatctttgtacttaaaatttaaactgtgagactgccaggtgtggtggtggctcacgtctgtaatcccagcactttggaaggccgaagcaggtaggtcacttgaggtcaggagttggagaccagactggccaacatggtgaaaccccatctctactgaaaatacaaaattagccgggcaaggtggcacatgcctgtaatcccagctactcaggaggctgaggcaggagcatcacttgaacccggaaggtggaggttgtagtgggccgagattgcgccactgcactccagcctggacgacagagagagattcggtcttaacaaaacaaaacaaaacaaaacacaaaacacaggctgggagcagtggctcatgcctgtaatcccagcactttgggaggctgagctgggtggatcacgaggtcaggagttcgagaccagcctggccaacatggtgaaaccctgtctacactaaaaatacagaaaaaaaaaaaaaaaaaaaaaaacctgggcatggtggcacgtgtctgtaaatcccagctgctcaggaggctgaggcagaagaattgctcaaacccaggaggcagaggttgcagtaagccgagattgcaccattgcactccagccaggcggcagagcaagactatctctcaaaaaaacaaacaaaacaaaaaacaaacaccgtaagaggccgggcactgtgcttcacgcctataatctcagcactttgggtggccgaggtggggcagatcacctgaagtcaggagtttgagaccggcctttccaacaaagtgaaaccccagctctactaaaaatacaaaaattagccaggcgtggtggtgtgtgcctgtggtcccagctactcaggaggctgaggcaggagaatcgcttaaacctgggaggcagaggtttcagtacgacaagatcgcaccactgtactccagcgtgggtgacagactctgtctcaaaaaaacactgtaagatcttatagtcatgggaaattgcaggtaatccacaatatttaattacatattttattttttgaaactgatattaagctatgataattgtagcatttctagtttagcagcaattggaatattcattgcttacggatttaatcactgaattaaatagcagaacagtgcagaatactgttctatagattattgtttatgagttattgctagtaaatgaaattatttaattttatatgttaatattaagtgtaagtatacacatacataaatatacagctaattacaatattaatttatattaagacatttcatttttttgatcatggtagagctataattaacagcttaaatgaaggtaagttcccccacaaaaagctcaatgacttgcataatgacaaactctgaacaagatggaatgttttcaattttaacatagttttattaatatagtaaataaacaaaatttagcaaatatcaaatatttagtatcaaagaaaatttaccataaaaagaatacttctgaaatagcaatgcatattttcgttatacgcacctttaagaaagcagtgatctcagaatgtctacaagtattactattattattttaatttaagagtctttcaaaggccaaattgttgcggtttgtggggttcttttttcagtctctagtttgaggaattttctggagttatatttttctttttttttttttcaatcttgcccttaaatgcaatatatttgttttcttgatgaaaagaatgcaatcttagtcctttggaattttttttcttttttaacctggagaagactgttcaatgcagctatctttcaggtcacctttcctagcttagtaatgcctcaaaaaccaaggagcatatgtccatatcctgatttcttacaggtttcacagttacctgctagtggaagtgctacagaagtcacgttgttagtaagatatccaataaccaaagaggcttttgtaatagccttatttttacccttcacaatatttattgacataaaaatctgtaatcatacatttgagtactatttgcataaggaggttaaccttttagtaataatcacaaagaggttagtgtttgttattcattgacataagatggtatttccagctgcaccttctgttgggtatctcataattggcatgagcaggagtcctccaaaaaagtgttaaagtttcatagtttcacaagatacagagagcttatcacaagttgtacattttcaattagtttctaaggaagatagcatcattagtttgttagtactattatggtgcatggtgtctgtagacataataataaagataaagataataatgtgttattgaacttgccttctacagggagtaaaaaatcattctacaaatcaaagtcaaaggaggctgaggaaagcattacaaaaacgaaaaaggagctgggcccccaggtctgctaatttaggccaatcttttttttttttttgagtcggagtcttgctctgtcgcccaggctggagtgcaatggcgtgatctcagctcactgtaacctccgcctcctgggttcaagcaattctcctgcctcagcctcccaactagctgggattacaggcgcccgccaccatgccgggctaatttttgtatttttagtagagatagggtttcaccatgttggccaggctggtctcttggccgggcttgtctcgaactcctgaccttgtgatctgccgcctcggcctcccaaagtgctaggattacaggcatgagtcaccgcgcccagcagccaatcttctactttaaaaaacagtacaggctaaattatctgacttgttagtactttacatagttatgttgttatgactgttccagagttagtgagaaattgacagtctcctaatgtttttaaactattcattttccaaatgctctttttttgtgacaatgactgcctataccatcacttaaacattgataataatggtaataacaacatatgcttttaaaagttaatttcccctttaaaatttgacattacactttattcttcatgacaaaggtattcggcaaaaaagaatggaccactgaattgaaaaaactccaaatttggtcataaatgttatttgtatgttttaacaattgaatggacaatttgtcagcttgctttttattggtggcagaatgacacagtttatttcctgcacccaaagaatgaatcaaactttttatgttccaaatttttggtaagatgatataataatctcacaattattgagaataatgaaataaataatgtgaggtttttttttaattacagcagcagtcatgtcagttcaagtgaataaagaagattcaaaacccagaccaaatatgttttacatgcttcttttgtaaacttgctaaaaataattgctgtggagatggataattcaaggaattcaaggaaactttacaatgccaaatttctttctctaaggaaatgaaatctagaatccatttagtaaaatattaaaaatattcactattgctgggcatggtgacttacacctgtaatcctagcactttgggaggctgaggcaggtggataacctgaggtcaggagtttgagaccagcctggccaacatggcaaaaccctgtctctgctaatgatacaaaaaaattaaccgggtgtggtggcacacacctgtagtcccagctactggggaagctgaggcaggagaatagcatgaagcagagaggcagaagttgcagtgagccaagatcacaccactgcactccagcctgggcaacagagtgagactccatctcaaaaaaaaaaaaaattcactatttatatttgaatattttacttttttttccttattttttctttccctcacagatagttgaagaggtatattcttaacttggaataatcaatgttttgatagatctatgctttgcaagcatgtataggaaaaaagagaggggaaaatgaaaaaactaaggtattattttatactctggtatctgccaacttttaatctttgtaattcaattccatttataattcaactgaaggtgaattcttacattgagaagaagaaaatgaaatcaggataaaagcaagaactttgtttttgcataaatatgctaatgaaaaactggagaaaaaaattcctgccaccaatggaattacagttggaaaatccatctaagaaagacagttaaacttctcaccttccagaaatgaaggtaagtgcctttactactgaagtacaataaaatcctgttttcacaatttgtattttctccacaattttcactcttcctcagtcctattcatctctcactgagtccctcttaccaaacatttgagaatttcccacaatttaccccctacttctgcagatactttccatatcttctagtgtttctttccttcatcagctccaaaggtgagttaaatcaagagcttgggtaaagaaggccagcctctgagaagtccaggtggaagcaatgtgtcttcagaagtaaagtgctcaaacccaaggagaaaaaaatgggatgggagatccaggaggactccagcattatttcagccctgtcaagtactgttactatctactttaatagtaaaagtaaaagcaggagtggcagatgctagtcaggctgaaacagtcctgcagcttcttggaatctatatacttgagagaagagaaccgaaccccactctctcatgggctgctgtaaaccacccatacgtttagtttcctttgtcaaatcttgtttttttgttttgttttgttttgttttgtttagaaacagggtctcactctgtcaccaggctggagtgcaatggtacaatcataactcactgcagcctccaactcctggactcaagggatcctcctgcctcagcctccaaaattgctgggattacaggtgtgagccactgtgcccagacaaatctcactttttaagatagggagaaaagctttaggaagaagtaaaaactatttgtaaagattattctggcagcagaatcgctattttctttcattttatttttctcttatttgctacattttatttgaatccccagtaaaagatgatttgattgcattgagacaatatataccttcctgtatgtatagaccttttgtatgattaccttaaagaaggaaatatatgtctgtgtgtgtgtgtctatatatatatatagacatatatgtatactttgttttttatccattagttcatgtaaaacatgaacaaaatataatgttctttgtaagcatatgccaagaaggtagtaaaaactgtgatttgtattctacacattccaaaacaccatattgcaaatcttcacaaaacattctgggctatgtctatacaacttaaacaaagtgaacatacacactatttagtgaatttgggtctaactataaaatggaattttctcttgcttcaaaaatgcatacatacaggttggctggtcccagattcttgaacagctaacattctattttggtttggtgttaggttgactaaaacccggagaggcagagcttgttttccagagaaatctcagcacattcttgaggctgcctgttatttttatattaataatgatgtacgtagttgcttctaaaattctatccagcttttgaattcttaggttacttagatgataaaaagtcccatggatgctattttttgagtgaaaaagtagcactcctctaatcattcgttcagtgacgttctctaaaggcaaggctttctgaggatttaggtagacagaggagtattcatggtcaaatacaggacctccttatggaagttagcctgagcatgtacaagatggaacaaattcaaaaagcttctgtcatcttcatcacggtctcctatatgccatacatagtggggaaaagaaaatgacagttaaaatgttaagtatataatttattttattaattaatttaatttttgagacacagtctccccctgttgcttaggctggaatgcagtggtgccatctcggctcactgcaacctctgcctcctgggttcaagcaattctcctgcctcagcctcccgagtagctgggattacaggcatgtaccaccacacctggctaatttttgtatttttagtagagatgaggtctctccatgttggccaggctggtttcaaactcctgacctcaggtgatccacccgccttatacgtatataatttatttgaaacataagatgttctaattttccctagtaatatttatttatttattattattttttgagacagcgtctccctgtgtcgcccaggctggagtgcagtggcacaatcttggctcactgcaagctccacctcctgggttcaagcgattctcctgcctcagcctcccgagtagctgggactacaggcgcctgccaccacgcccagctaatttttttgtatttttagtagagacggggtttcaccgtgttagccaggatggtctcgacctcctgaccttgtgatccacccgcctcggcctcccaaagtgctgggattacaggcatgagccacctcgcccagccttccctagtaatatttaaacaggagactttttgttagtgactttactaagtcaagttaactactgaaatcatggaattatataagaaaagtagattagaagtcagaagaaaaggatgctcatccatgctttattgcttctaactttgagaccttggtaagtcaggtaacttctctaagccttagttttctcatctgtaaaatagggttaattatcatgttggttacttaataaagctgtaaaataatatttacaaatatatttttatgctagtgacagttggtaagtgagcaagttaaatttttttgctgtgcaaaattgaaagtggttcctttcaaagcagactcttcaactttatattctccattaaaaccaataccagatttttaaagtgacgaaagccaggaactaaatatattgcaaggaaaaacaaacaaaagtccgcttcctctacttattgttagtttttattttttaaagtcaacatagaaatagcttttttttttttttccattcttggactgttagagaaaaatatctctgttttaggtggagactagagcgcatttttacgcacacctgtgcaccaagtacattcctactcaccagacataattgattgcagcatttccattataacacatgcaaatgcatttgccacattctgcaggaagttctttctttccactggagtgctaaagactttgcagactttttgcatcattttaactgtccaatccatgcagtacagttctttctcacacacctgatttagacatataaagcgctataaaccttcatgtgaagaaagctatagaatttgaaaatggtgaacaatgatgaataattatagtttgtgattttacataatttatgatacctgacaccatactgagtctatacatgggaaatgctcttctatctaatactattttgctttcaaatggtacaattttaatgggaaaaaagtatgaagtaaatacaagcctaatttaagattatcatagaagaatatttactaatgaaataactaatattgaaaacaggccaggcacgctggctcatgcctgtaatcccagaactttgggaggccaaggtgggcagatcacctgaggtcaggagttcgagaccagcctggccaaaatggtgaaaccctgtctctactaaaatacaaaaattagccagacatggtagcgagcacctataatcccacctactcaggaggctgaggcaggagaatcacttgaactcaggaggcggaggatgcagtgagcggagatcataccactgcactccagcctgggggacagagccagactccatctccaaaaaaaaaaaaaaaaaaaaaaaaaaaaaaatatatatatatatatatatatgtattgaaaacagttactgaacatagaaaaaaaatttctgctcatttactcattcaataaacatttattgagcacctgctaggagctgaagatacaatgacaaaccataaagacatggctctattttcaagaagtccaatgaaggtgatagacaaatgggcaatttcaataagcaagagaattctatggtattgtcgactttccatcttgagaattttagggaatatttgtttcttcattattgaaaagataaatatttaaagattacatgttcctagctaaaactgactgaaaagtaaaaggtttcttttttttttttttttttttttttttgagacggagtctcactctgtcgcccaggccggactgcggactgcagtggcgcaatctcggctcactgcaagctccgcttcccgggttcacgccattctcctgcctcagcctcccgagtagctgggactacaggcgcccgccaccgcgcccggctaattttttgtatttttagtagagacggggtttcaccttgttagccaggatggtctcaatctcctgacctcatgatccacccgcctcggcctcccaaagtgctgggattacaggcgtgagccaccgcgcccggccaaggtttctttactaacatccttaattgccaatctaactcacatagccaaataaataatgcatattattaaaataaactgtatagtagtgtaactaaataatagcactgtgataggaaagatctattgactatttattatgtgtaaagcactgtattatgaactatgaaagaaataagtgacacagtactggatttcaaagagcttgcagtctattttgggagatgacctactccacacatacagtggcttaaggacactaatagtagatgaagatagagaagacaaatcagaggtaattcagagaactttaatgatcagaattgacatgttaatcagagaaggctttctagagaaggcttccccacccctagtgattttctcttcattacatttgctatagtgctgccaaaatgatctgccaaaaacacaaagccaattatgtctctccccttcataaaacttttcagtagctccctattagaaaatgggttcaagctccacagaatggcccacaaaacccttccttacctagcctctcccttcatgtctaacctcacctcctgctactcttctgcagattctacccttcagaaatcatactgaactgcttacagtgtcctgaatacagtcacatgatcccatttttcttctgccttgaataatctgctgccaccctctatctgcctggtgaactcctacttattcatttacttatttattttttagagacagggtctccctctgctatgcagactgaagtgcagtggcgtgaccatagctcactgcagcttcaaactcctgggctcaagtgatcctcctgcctcagccttctgagtagcagggacgatagacacacaccaccacacccagctagttttattttatgttttgtagaattgaggctttccctatattgcccaggatggtcttgaattcctggcttcaagtgatcctctgggctcagcctcccaaagagctgggattatagacatgaaccaatgcactcagccttttatttaagtaatttattttttgagatgagatctcattctgttgcccaggctagagtgcagtggtgctatcttggctcaccacagccttgaccacccagactcaagtgatcttcccacttcagctcctgagtagctgagctcacaggcacgcatgccacaactcctggctaatttttaaattttttattatttatttatttatttttttgagacagcatctcactctgtcacctaggctggagtgcagtggcatgatctgctcactgcaacctccgcctgccaggctcaagtgattctcctgcctcagcctcccgagtagctgggattacaggcacctgccaccacacctggctaatttttgtatttttagtagagttggcatttcaccactttggccaggctagtttcgaactcctgacctcaggtgatccgcctgactcagtctcccaaagtgctgggattacaggcatgagccatcatgtccggccaatttttaaacatttttattatagagacagggtcttgctgtgttttccaggctgctctcgaactcctgggctcaagaatctcataatttatggcccatagtaagcactcaatacaaatttgtgttaaatgaatattaaataaatataatattatatatatatatatatatatatatgtatgtgtatatgtatgtgtgtgtgcgtgtgtgtgtgtattgagaggggagagggtctcgttctgttgcccagactggagtacagtggcacaattttggttcactgtaaccttaaactcccaggctcaatcaatcctcccacctcagcctcctgagtagctgggaccacagatgttgccaacacaccgagctaatttttgtatttttttgtagagacgggtttcgccatgttgaccaggctagtcttgaactcctggactcaagtgatcctcctgtctcagcctctcaaagtgctgggtttattacaggtgtgagccatcccgtccggcctaaatatatttttaagactttttattttgaaacattttgactatacaaaattagagagaataatataataaactcccagtactcatttcccagtttcaacaattatcaatcttatttcaactctatctccatttactcccaagtcctctccccaacccacccccacagtgattattttgaagtaaatcaaatgggatgctttttttaacatggaatttttttttaaaaagaatataacttagcagaactgtataatgaaaatccagacttgaagtggggagaagttaatagaagggatgattccaaatattatagtttatgacatgttttaatattaggccaggtgtggtggctcacacctgtaatcccagcactttgggaggccaaggcgggcagatcatgaggtcaggagttcgagaccagcctggccagcatagtgaaaccccgtctctactaaaaacacaaaaattagctggggcatagtggtgcatgcctttagtcccagctactcaggaggctgaggcaggagaaatgcttgaacatgggaggtggaagttgcggtgagccgagatcgcaccactgcactccagcctggacaaaagagtgagactgtctcaaaaaacaaaacaaaacaaaagaaaacatatgttttaatattttgaaaaagaaacattaaaaatatatacttcaatactcatttttacaaaatcttttgtccacatttcagttccttcagggcagctccctgtaggtcaattgtagtgttaaaaaacttgctagagaaaaacttatttttacttaccaaagccaaaaagactacgagccttgccagttcaatggtgcgtccattcacagctttactagccatgaaactgaaacagatgttgtttccacttagcattaggagacgtgcattattctctagaagccactcacggggaaccacttttattagaggaagaacaattatttaatgagaaatcacacaacagctatagtaaataccattaagtacatgcaatattttatctttattggaaatacaattagtgccaagggaaatgctcagaaaaaaatgctctagttttccaattatggcattcagtcagagacaggttattgccatgtcatggaggctcttacaaatgtactaataatataaacaaagcaattctcctacacataggtcagcaggcaaagtgttctaatcctgtgcaaggaaagcatccttgtaaactttagaatctaaaggattatgcaggaataggaataattgtttcacctttcctttactcacagaagagggctttttacagaacctaggagggtgtttctgagaatttacaacatgggagtaattgagctaattaaatgaagaagctttcaaataataataataataaatgtttatttataaaattggcaagcaaaggaaagtaagttgattatatgcattctcttcaaacataatgccaaactctttaaatattttagagcattcagtgatttccaacaggcacatcatttgttacctgtagaattatccttataattttataactgcattttaacaataaatttctattattctatgttagtaaatatattttttacctgatagttcatctacaagactgataacatcatctgctgtccactctttagtgctagcgtcatatagtaacttaatggcatcagccaaacctttcagactgaattcatctgtaggttcttctatcatttcctgccaaaccacctgtcctgaattgaaacaaaaacgaggctatgacagaatagttggctttgtgataaagacttgtttaaaaaggaaagtgaattgcacaatggaatcccattacttatacaagctactttcattttaacttttgaaacaagaagtcaattctggtaatagtatagatttgaacgtctctggccgggcgtggtggctcatgcctgtaatcccagcactttaggaggccgaggtaggaggatcacttgaggtacggagttcgagaccagcctgtgaaaccctgtctctactaaaaatataaaaattagccaggcatggtggtgcacgcctgtagtcccagctactcaggaggctgaggcacgagaatcgcttgaacctgggaggcggaggttgcagtgagtggagattgggccactgaactccagcctgggcaacacagcgagactctgtctcaaaaaaaacatgtgtgtgtgtgtgtgtgtgtgtgtgtgtgtgtgtgtgtgtgtatgcttcttggccaggcacagtagctcatgtatgtaattctagcacttggggaggccaaggtgggaggatcacttgagcccaagaggttgagagcaacctgggtaccaaagtgggaccctgcaggagatcgagaccatcctggataacacggtgaaaccccgtctttactaaaaatacaaaaaactggccaggcgcggtggctcacatctgtaatcccagcactttggaaggccgaggtgggaagatcacaaggtcaggagatcgagaccattctggctaacacggtgaaaccccatctctactaaaaatacaaaaaattagccaggcatggtggcaggcgcctgtaatcccagctactcgggtggctgaggcaggagaatggtgtgaacccgggaattggagctcgcagtgagccgagattgcgccactgcactccagcctgggtgacagagcagactccgtctcaaaaaaaaaaaaaaaaaaaaattagctggttgtggttgcacgcacctgcagtcccagctacttgggaggctgaggcaggagaatcgcttgaacccgggaggtggaggttgcagtgagccatgatcgcaccactgtgtgcgtgcatgcatgtgtgtgtgtgtgtgtgtgtgtataatatatgcttcctaaatatatatatgcttcctaaagtaaaaataatgaaccagttatgttacaaccctgaaagatgggtgctcaccatcttgaggagatattggcccaaagatgatatacagtaatcttgcctgattcaccattggccatggttttaatattcgcgtcaaccaaaaagcagaatcacttcgatgtgtccaatgatcaaggaggacattcctacagaagagtctgattcttaactccagtttttgggcacttcctatgaagacaaaagaattgtaaatcattcttcgtagaaaggctgctgtgcatattgaatagtgatcaaagcaacttattaatcattatggttagtgatagtaaactaggtttctaaacaggaagtaaccaagagattatctattcttaaactcccctaacttcataatttgtctatctacttacttacttttaccttcctgatttatagtcaatattttgaataatgggtcaatcaatcaaaagacatgcttaagcttaccagactcttgtacaattttggatttaaaaagaaataaatgcagagaaaggtcaaagacatatatcattaatatactttgtactgaaagtgtcacttcattttcctctatgaaagttttatggcaggtgtggtgactcttgcctgtaatgccagcacgttgtgaagccgaggtgggaggatcacttgaggtcaggagttcaagaccagcctggccaatatggcgaaaccctgtctctactaaaaatacaaaaaaaattggccgggtgccgtggctcacacctgtaatcccagcactttgggaggctgaggcgggcagatcacgaggtcaggagatcgagaccaacctggctaacacggtgaaaccctgtctctactaaatatacaaaaaataagccgggagtgatggcgggcgcctgtagtcccagctacttgggagactgaggcaggagaatggcgttaacccgggaggtggagcttgtagtgagccaagatcgtgccactgcactccagcctgggtgacagagcgagactctggctcaaaaaaaaaaaaaatatatatatatatataaatatataaatatatatacaaatatataaatatatataaatacataaatataaaaatataaaaatatatataaatatatataaaatatataaatacataaatatatatttatatataaatacataaatatatatttatatataaatacataaataaatatatatacatatataaatatataaatacataaaaatatataaatatataaaaatatatataaatatataaaaatatatataaatatatacaaaaatatatataaatatatacaaatatatataaatataaaaatatgtataaatatatataaaaatatatataaatatataaaaatatatataaatatataaatatatataaatatataaatatatataaatatataaatatatataaatatatagatatatatataaatatatatatctatatataaatatatagatatatatataactatataaatatatatgaatatatataactatataaatatatatgaatatatataactatataaatatatatgaatatatataactatataaatatatatgaatatatataactatataaatatatatgaatatatataactatataaatatatatgaatatataactatataaatatatgaatatatataactatataaatatatatgaatatataaatatatataaatatatatgaatatataaatatatataaatatatatgaatatataaatatatataaatatatatgaatatataaatatatataaatatatataaatatacaaatatatataaacatataaaaatatatataaacatataaatatatatagatatataaacatatataaatatataaatatataaatatatataaacatataaaaatatatataaatatataaacatatatataaatatatatataaacatatataaatatatataaacatatataaacatataaatatatataaacatatataaatatataaacatatataaatatatgtaaatatatataaacatatacaaatatatgtaaatatatataaacatatacaaatatatgtaaatatataaaaacatatataaatatatataaacatatataaacatatatataaacatatatataaacatatatatataaacatatatataaatatatatatatatagtagccaggcagcggcagtggcacgtgcctttgatcccagctactcaggaggctgagacaggagaatcacttgaaccctggagatggaggtggcagcgagctgagatctcacaactgcactccagcctgggtgacagagctagactttgtctaaacaacaacaaaaaaagaaaatgttatgttgctgttgttgatagacatggggtcttgctctgtcacccaagctggagtgcagtggcatgactgatcatagctcactacaaccttgaactcctgagctcaagcaatcctcccacctcagcctccctagtagctgggaccacaggctaattttattttttgtagcgacagaggtctcactatattgctcaggctggttttgaactcctggcctcagatgatcttcccaccttagcctcccaaagtgttgagattacaaagcatgagttaccacactcggatataaaaattttagattaacggccaggcgtggtggctcatgcctgtaatcccagcactttgggaggttgaggcgggtggatcatgaggtcaggagattgagaccatcctggctaacatggtgaaatcccgtctttactaaaaatacaaaaaaattagccgggtgtggtggcgggcacctgtagtcccagctacttgggaggctgaggcagaagaatgggtgtgaacccgggaggcagagcttgcagtgagctgagatcataccactgcactctagcctgggcgacagagccagaatctgtctccaaaaaaaggaaaaataaaaaattagattaacataggactactttttcaaaagctttactgagatataaatcacataccataccatttacccatttaaagtgtacaattcagtggtttttagtatattcacagatatgtgcagccatcaccacagccaattttagaacattttcatcacttcaaaaagacatcctgttctttttgctatcatcctgttatctctctgtcctttaccacccctagccctatgcaaccaatactctactttccatctccatggatttccctattctggattttttttttttttttttttttttgagacagagtcttgctcgtcacccaggcgggagtgcagtggtgtgatctcggctcattgcaacctctgtctcccgagttcaagcgatgctcctgtctcagcctcccgagtagctgggatcacaggtgctcctcaccacgcctggctgattattttgtatttttagtagacatggggttttgccatgttgaccaggctggtctcaaactcttgacctcaggtgatccacctgccttggcctcccaaagtgctgggattacaggtgtgagccaccacgccccgcccctattctggatttttatacgaatgaaatcatatagtatgtggcattttgtgactggcttatttcagctaatacaatgttttcaaggttcatccatgttgtagcatatatcagcacttcattctttttttttccttcaacttttaagttcagaggtacatgtgcaagatgtgcaggttacacaggtaaacgtgtaccatgatagtttgctgcacagatcatcccatcacctagatatttatttatttatttttattatactttaagttctgggatacatgggcagaacgtgcaggtttgttacataggtatacatgtgccatggtggtttgctgcatctatcaacccaccatctacattaggtatttctcctaatattatcccttcccttgcccccatgcccccatcacctagatattaagcccagcatccattagctattcttcctgatgctctccttcccccaacccccacagcacttcattctttttaatggccaaataatattctatggtatggatgtaatactacattttgtttatctattgacccattgatggacatctgagttgtttccatcttttggctactatgaataatgctgctattaacattcatgtaggccaggcatggtggctcatgcctgtaattccagcactttgggaggctgagacaggcagatcacttgagcccaggagtttgagaccaggctggacaacatggtgaaaccccatcactataaaaaataccagaaaaattagctgggcatagtggtatgtgcctgtagtcccagctactcgggaggctgaggttggaggattgcttgagcccaggaagtggaggttgcagtgagctgagaccatacctctgcacttcagcctgggtgatagagccagaccctgtctcaaaacaaaacaaaacaaaacaaaacaaaacaacaataacaacaacaacaacaacaaaaccattcatgcacaagtttctgtgtggtcatgttttcatttctcctggggctatatacctagaagtgaaattgatggatcatataactctatgtttaatcatttgagaaactgtcagactattttgcaaactgactgcaccattttactttcccgccagcaatatatgaggattgttgtcacattctcactaacacttattatttaaatcgaactttctgattctagccatcctaatggaatgtgaaatggtatattactatttctttgcttttctgagacagtgtctcactccattgcccatgctagaatactgtagagcagtcatggctcactgcagcctcaaccttcaggggctcaagtgatccacttcagcctcctgagtagctgggattacaggtgtgagccaccttgcccagtctatcactgttttcttatgacagctttattgaaatataatttatatgccatacaattcaaccatttaaagtgtgcaattcaatggtttatagtatattattaaatttcttatattgtgataaaatatagatcacataaaatttgccattctaaccatttttaagtacgcaattcagtggcatcatttatatttacactgttgttcaaccaccacactatttccgaaagtttttcatcatctcaaacacaaactctgtaaccattaagcagtaactccccactcccccctcccctcagctcctggtaacctcaaatctactttctgtctctatgaatttgcccgttctaggtatctcatgtaagtagaatcatgtaatatttgtccctgtgttcctggcttctctcacttagcataatgttttcaaggttcatccatgttgcagcatataccatattttgtttatccattcacctggtcttttttgtttgttttgtttttttttctaagatggagggcctcctctgtcacccaggctggagtgcagtgactggatcatgcccgcctaatttttttttttttttttttggagatcgggatcttgctatgtcgcccaggctggtctctaactcctaggctcaagtaatcctcccacttcggcctcctaaagtgctgagattacaagcatgagccactgccctctgcctgcaatgaccattcatatgcatgtctccttgtgcatattgtgggagtttctcagagggaaacagctcgatataaggttctataatttaaaaatatgaaatatttctggtatatagagaggtttacaggatgctataatgagctcctttgtatctaccagctggcttaaggaataaaatatcatcaatacagttgaagccctctttctccaatctcatattgctttttgccccactgtcttattcgatatttatcattcccttacatttctttgtccttttactgtagatgtgtgccacaatttattttatttttatttcttttgaaaaggggtctctgttgcctaggctggagtgcagttacttgatcttggctcactacagcctcagtctagtgggctcaagctatcctcccacctcagcctcctgagcagctgaaactacaggtacatgctatcatggctggctaattttttgtagagacatggtctgttacattgcccaggctggtcttgaactcctggcctcaaggatctttctgccttggcttcccaaagtgttgggattgcagctgtgagccacggcacctggcccactatttatttttttatttatcgagacagggtcacactctgttgctcaggttgagtgtggtggtgcgatcacagctctctgcagcctctacctcccagggtcaagtgatcctttcacctcagcctcctgagtagctgggaccacaggcacacaccaccatgcctggataattttttattttttgtagagacaaggtctcgctatgttgcctaggctgctcttgaacttctggactcaagtgatcctcccaccttggcttcccaaagtgctgggattttaggcatgagccactacacctggcccaaattacttttaattacatttttaaaactctgtttattttttctattttaatctctgtatattatatgcaaattatagttttttacctggtttgctgcagacagccatttgtatcttgcggcagagattagtcagttcgcataagaaattataaacgcgatggcactcaagttcatcccaacctgctgttaaggtctgaggaaaataaagaaaacattgtggatattcagactatcaagtcaaaacataagtcacaccaggcatggtggctcacgcctgtaatcccaacactttgggaggccaaggtgggtggatcacctgcagtcaggagtttgagaccagcctggacaacatagtaaaaccttgtctctactaaaagtacaaaattagccaggtgtggtggcgggcacctgtaatcccagctactcgagaggctgagtcagaattgcttgaacctgggaggtggaggttgcagtgagatgagatcatgccattgcactccagcctgggcgacaagagcaaagctctgtcacaaaaaacaaacaaaacaggccgggtgcggtggctcacacctgtaatctcagtactttgggaggccaacgtgtgcagatcacgaggtcaggagattgagaccatcctggctaacacggtgaaaccccatccctactaaaaatacaaaaaattagctgggctcggtggcacgcacatgtagtcccagctacttgagaggctgacaggagaatcacttgatccctgagtagaggctgcggtgagccaagattgcgccactgcactccaacctgggcaacagacagaaactctgtctcaaaaacaaaacaaaacaaaaacaacacaagtcactactgccttatgagtgtaactgtttttagcatatgatcaaggtgatgtgcaatttttacccattatggaacaatcaaattaataacaaatttacataaacaaaacttgggaagctccaaaatccagtttctttttggttggaaaggaagtatcttttcagagaactttttttttttttgagattcaatctcactatgttgcccaggctggaatgcaacggagataacttttttatttgtttgtttgagaaggtttaaatggtactgaatcctgaacttcgacaatgtgaggcaagtaactaaaaccctgaacacagtttagatatttcacttacaaccatgctgtggctttaagactagagtagaacccctttgacctcccctagttgtcatttatgatattgcttataaatgagaatgatccaatttcaatgtgacaattctgagcatttatttatgactttttttttttttttttttgtagagatggggttttgtcatgttggccagactagtcttgaactcctgacctcaggtgatcggcctgcatcagcctcccaaagtgctggaattacaggtgtgagcaactacgcctggctatttatgacttttgaatgtgaacaaacaaaacactttcattggctgggcacagcagctcatgcctgtaatcctagcactttgggaggccgaggcaaatggatcacttgaggtcaggagtttgaaaccagcctggccaacatggtgaaaccctgtctctactaaaaaaaaaaccacacacacacacacacacacacacacacacacacacacacaaaatagctaggtgtggtggcaggcccctgtaatcctagctacttgggaggctgaggcagaagaatcacttgaacccgggaggccgaggttgcagtgagctgaaatcacgcgactgtactccagcctgggtgacagagcaagactccgtctcaaaaaaagaaaaaaaaattaatctggccagtcgtggtggctaatgtctgtaatcccagcactttgggaggctgaggtgggcagatcacctgaggtcaggagtttgagaccagcctgaccaacatggcgaaacctcgtctctactaaaaatacaaaaattagctgggtgtggtagcgcatacctgtaatcccacctacttgggaggctgaggcaggagaattgcttgaacctgggaggtggaggctgcagtgagccgagagtgtgccactgcactccagcctgggcgacagagtgagactctgcctcaaaaataaataaattaattaattaataaaaactaatcttattccctgtggaaggacatacaagaaactgaaaactgattatttctggtgaaggaaactcagtggacaaggagagagactaactttttactttatacattttctacccttggaattgtacaagaatacatacataggtattacatgtcccaaagaaagaaagaaataagtaaaaaacaaaattaaataagaaaaatctgtcttggaagaagactagtaggagggcttagacccctggaatctgggtgagtaggagttggtggctggtaggctgagcacagcaagattcttacgggtgcagtgcctgcctcacaaggttgttgtaaatttaaattagttaatacatgttgtcgggtgtggttgctcacgcctgtaatctcagcactttgggaggccgaggtgggtggattgcttgaggtcaggagttcgagaccagcctgaccaacatggtgaaaccctgtctctactaaaaatacaaacaaataattagccaggcgtggtggcgggcacctgttatcccagctactcaggaggctgaggcaggagaatcgcttgaacttaggaggtggaggttgcagtgagccgagatcatgccattgcactccagcctgggtgacagagtaagactccgtctcaaaaaataaataaataaataaataaataaaaataaattagtcaatacatgtaaactgcttagaacagtgtttggcacacactaagatgaataaacgctagttattatcttctttgtttacaataaaagattagtcaaaatgttcttgaaataatacatctgattactaatatcacaccttaaataaccagcccaagactaaactcattatatagatacagatacacgcatgcacacacaccacctcataatatttctaatctttacaactagtagaaactttgaggacaccaattcttcaggaggagtaaccttcattcagcatatagaatggtttgggggataaataaatgtcaaacattttttaccactgagaaactcaaaacaaaaatctgagatagcaaacactattagattaatacattctcaaatctttattttattttgctctttttaagattattataactttattaacctatgaaaagagagattggatattctatttgttatcagttccaaaggtatcccttttcttctctgattaaaaaaaatgtacctgtaaaaacatgccataacatgttaatcctaaacactgcataggagctgcacagccattgaatttaaagcaggaaacctgtaaagaaaacaatgttaatacctccttgtcagtgaaactatagtttgacaatggtggaacaatggtttgacattcaaatttaatggaaataagcaagaattttttcagcacctattctgatcaacattggttacataggtggggattataaaagtagtataaaagtctcggctgcgcgcggtggctcatgcctgtaatcccagcactttgggaggccgaggtgggcagatcacgaggtcaggagatcgagaccatcctggctaacatggtgaagctccgtctctgctaaaaatacacaaaaattagccgggtgtggtggtgggcacctgtagtcccagctactcaggaggctgaggcaggagaatggcatgaacccaggaggcggagctggcagtgagtcgagaccgtgccatggcactccagcctgggtgacagagcaagattccatctcaaaaaaaaaaaaaaagtctctactctcaaggagttcacaatttatttaataataatattttatttttattttttatgatggagtcttgctctgtcacccaggctggagtgcagtggcatgactttggctcactgaagcctctgcctcctgggttcaagtgattctcatgccttagcctcccaagtagctggaattacagacaccaccaggcctggctaatttttgtacttttagtagagacggggtttcaccatgttttataacttcttgtataaaaccttttgccggtttagtagagacggggtttcacgcctgtaatcccagcactttgggaggccgaggtgggaggatcacgaggtcaggagttcgagatcagcctgaccaacatggtgaaaccctgtctctactaagaatacaaaaatttgctgggcgtggtggcgcacgcctgtaatcctagctacttggaaggctgaggcaggagaattgcttgaatctgggaggcggaggttacagcgagctgagatcgtgccactgcactccagcctaggcggcagagcgagactccatctccaaaaaaaaaaaaaaaaaaaaaaaaaaaattagccgagtgtggtggcacacgcctgtaatcccacctactcaggaggctgaggcaggagaatggcgtgaacctgggaggtggagcttgcagtgagccgagatcgcaccactgcactccagcctggaggacagagtgagactccatctcaaaaaaaaaaaaaagttttatttatgaatgtcatgctttaggaagagtaatcttgattcagcatacagagcggtttggggagtaatgaattggatgacagaaaggtcatctgggaagctgctataataatatagaccagaactcaatgcaaatgctgacatgaaaaaattggctgggcaaggtggctcatacctgtaatcccagcactttgggaggccaaggtgggcagatcacctgaggtcaggagttcgagaccagactgttcaacagggcaaaacctcatctctactaaaagtacaaaacttagccaggtgtggtggtgggtgcctgtaatcccagctactcaggaggctgagacaggagaatagcttgaacccaggaggtggaggttgcagtgagccaagatcatgctgctgcactccagcctgggtgacaagagcgagactctgtctcaacaaaaaaaaaaaaaaaagaaaaagtcagtgtatcagaaacagcagataccactgagtgtagaactgaaccatcaagagttggacatatgcttggatttgtatataaaattgagtcttataaagagactatgcccaaacatattaatacacatttccaagtctattatcataaaatgtttgtcattttatatattaaaatactttcccatgtttctatacatttaaacaataaaatttcaaaattcagaaattatttcactttaatacaatatctacatcactactttaaaacttcctcaggatttgtatgtggtgtaaaatatactttatactctgacaaacctaataaacttgaatgatgtgcttagttatatatgaaaattgttttataaacaagtgaaagattactacattttgacattatataatctcgaagtacttggtaaagtattagattataataaatcaattttttagtgctaattcatgaaattctactaatatagagtaaaatgagcataagataataataaaatatctttactggaaatcaagattgtaaactaatttagaagtatgatcttacttctgtgagtatcttgtgaatgtattttagcctttccttggtgggtagcagcaatgtgcatcttttaaacagtagacctaagaaagtaaagagacataagaaaaaatgacaacaatacaattaagaacatcaatagagcacagaataatgtttcctgaaagtcaagtatggtatatcacagtggactatgagttgatatgatttctaagagaaagtttgggaggaagggtgcaaaacactttccatttatggtatttaccaagtgactctgatgctcatctaagaggccttggcataaaatcttgcaaaaaattgttaaattgctactataggacacatggaaaaatacatagagtataaaagatacaataagacaaagacacactagagaaattttattttgtctttattccacagaaaacagatttcaatatctcttgaaattaacctcatgtccacaaaggaatatgttttaagagttgttaatctaaaacatggaaagaatgagaaaactgatttttcttttttttttttttttttgagacaaggtcttactctgtcgcccaggctgaagtgcagtggcatgccatcatggctcactgcagtctcgaccttgtgggctccagtgatcctcgtgtgtgccaccaagcccagctaattttattttatttttcttgatacagagtctcgttctgttgccaggatgaagtgcagtggcgtgatctccgctcactgcaacctccacctcccaggttcaagtgattctcctgcctcagcctcccgagtagctgggactacaagtgcacaccaccacgcccagctaatttatgtatttttagtgacgaggtttcaccatgttggccaggatggtctcgatctcttgacctcatgatccgcctgcctcggcctcccaaagttctgggattacaggtgtgaaccaccatgcccggcccaagcccagccaatttttaaaaaacattttttttgtagagacagggtcttgctttgttgcccaggctggtctcgaattcctgggctcaagtaatccttccaccttgacctcccaaagcactgggaataaattgcgttgggccgagaaaacaggttgtgtatccctctctccaaatacaaaaatttaagtcataagtacttaaaatttcagaagctagattttttttttccccacagaaagtatccagttaggatgaaatatccatctcttccttctaagatatccttttatgggacttgcatgttaagaatgtataagattttgtgtacagatactttaaaaagaaaaaaaaaaaaactcctcaatttctcagtgagatgtgtaacttgagctacagtgacaggaagtgtatgatttgtttcctctaactttaaacgttctattttcctaaaatggccatacattgttaacattcctatgagggcaaatgtcctcaaactaaaaataagatatatggtaggaaaatacatacctgaaccttatgacttttttcagctttcatcttctatttacttttttacatattataattactttatataattctgaagaatctacaggagtctaacttatttttagaagttgctatgtttgagtaacacatgaacagaattgttttaaacaaaaaccctctttatttttgtatataaaaagacatttttcatacttgacaactaagggaaaaaaaagacatttttcagtgtttggtttttaagctgagttctttcccttcatacattggtatccagtttcacagcatataataactaaggaattccaggcattaattcttagaattctactcctgggcacaattgatcctcctgcctcagcctcctgagtatctgggactacaggcatgtgtgactgcatccagccttattttggtatgctgactgcctaatataaaactcctatttttaaggattacaacttaccataaaacccaatactggctgtttaaaaaaaaaaaacaaccacaggtgctctgctataccctttagagactaacttttttaaagttcttccctaaatagagtcagatgtaatgttctttccacattggccatctgctctgttttatgtgaagaaacaaattaaaatttataattggccgagtacggtggctcactcctgtaatcccagcactttgagaggctgaggagggcagatcacttgaggacaggagttcgagaccagcctggccaacatagtgaaaccctgtctctactaatacaaaaattagttagacatggtggtgcatgcctgtaatcccagttactggagatgctgaggcatgagaatcgcttgaacccaggaggcagaggttgcagtgagccgaggctgtgccattgcactccagtctgggcaacagagtgagactctgcctcaaaaaaaaaaaaaaaaaaaaaaaagaaaattattcttcaaagcattgtgtgtgtgtgtgtgtgtgtgtgtgtgtgtgtatgaatatgagacagggtctcactctgttgccaaggccggagtgcattttcacaattgactcacttcagcctcaacctctgcggctcaagtaaccctcccacctcagcatcctgagtagctgggacaacaggttttgtcctctaatttgtttcctctaactttaaacattctattttcctaaaatggcaatacactgttaacattcctatgagggcaaatgtcctcaaactaaaaataagatatatggtaggaaaatatatgcctgaacctcatgatttttttcagctttcagctgggccgccatgcccagataattttttaattttttgtataaatggggatctccctatgttacccaggctggtcttgaactcctgggctcaagcgatcctcccacctcagctttccaaagtgctgggattacaggcatgagccactgcgcccggcccaaagcacagcattctgaaaatcttattttaatgtctgaaaataaggctggatgcagtcacacatgcctgtagtttcagatactcaggaggctgaggcaggaggatcgattgtgcccaggagtacgggccagcctgggcaacactgcaagatcccatctcaaaaaaaaaaatagtgaaaacaataatagatcaggtaagaatgacgatatgagaaaatggtaagtatatcaaacatttacttaaagaattagtcataaaccaagtgtttgcatcaaaattaaatagaaagttgaaatccttacatgaataaaaccatttaaaaaagcaattaagatcaatacatatttgtactttttactgaattatacatataattgtcttagtgtttttgttagtttaagcaattgagacttgatcagggagaaaaatttctttcagatcaaaaccaaagtataagctccactgtgttacccaggtaccacttcctctacaactaacgatgaattaaaaataattctttctctttttttttttttttttttgagatggagtttcgctttgtcacctaggctggagtgcagtggcgtgacctcggctcactgcaacctccatctcctgggttcaagcaattctcctgcctcagcctcctaagtagctgagaatacaggcatgtgccaccatgcccggctaatttttgtatctttagtagagacagggtttcaccatgttggccagagtagtcttgaactcctgacctcaggtgatctgcctgcctcggcctctcaaagtgctgagattacaggtgtgaaccaccgcagccagccgaaaaattatatttataatgagaagtaggaaaaagtagtttccatattctgttacaggctttactaagcctaatcataaatactgaaaccaacaacactgtaatcagatcagatacttttctttcatttggtcttattaaataaacaggtaatcatcaaatacattttgatatatttacatatccacatattcctaatatcttaaatctaagcatccttgggctactaaaaggcagtattcacttaacttactgttatgcctttatttaaatcacaccatcttgacatttggttttattgccatgctttgatgaattataaagtggtttcataattaaatcggtgttattaagtcaagtcaaaattagaattttacttcagcactctctgggacaatgaaatcaatgaatggagtaaaaggcataaatgattacaaattaaggaagaaagattatacagaatttgctttgataaggtcagtttaattatagcttagccacttagtaaatgtacttaaaaaaccgtagtttctgctgagaggataaatagtcttccataataatgtgtttaaatttctattttaaaggactagattatggttgaaagggaaaagagataaagagataaaactcacttgatccacaggaagtgacgcatagaaaatacatcaatttcctaacctgataagccactagacattaagcatcggtgacgttatatctatatgaaatctcaagaattgacactttacatcaaaatgcattttctcacctttaaagataactggttaagggagtgttctcacactaaagagtaaaaacatcatagaaacaggcatattttggaatatattccatttcctactggccttacagaattgtatactaagtttctcttaattaagcacagttctttacttgttgcaattctcattacataagttacctagagatctgtagtgctccagtatagcagagtcttgtctcctgtcaggcagctcaaggttatgaaagtcctgtagtaaaagtcttttgcttcctgatgaggttgagatataattaataatgtgttggctgactgttttggacaccatgcttagcatgctgatatccttcactaccaaaagaaatatatatgtgtatgtatcaatggcttaaatgcaagaacgtcactattaacacagtctattaacttataggttaactcaatcgtcatcattatcaccatcatcatccctttgggaaaaaagggaaaaaccttaaaattgtttaaaatctggttctcaatgaattagagacatgtttggatttaccaatcaaggtactatatcataattacaggcatgttttcaagagtttaagtactgctgtgttcaaaggaagatttaaaaaaattaatttagggctaggtgcagtgactcatgcctgtaatcccagtactttgggaggccaaggcggacagatcacctgaggtcaggagttcgagaccagactgatcaacatggacaaactccatttctactaaaaatacaaaattagcctggcatggtggcgcatgccagctactcgggaggctgaggcaggagaatagcttgaacccgggaagtggaggttgcggtgagccgagattacgccactgcacttcagcttgggcaacaagagcaaaactccatctcaaaataataataataataataataataataatagtaataataataattatttaagtattgtgctttctcattgtactccttacctgacaataatgaaactttagaaaataaacacttaaacacttaacatgaatgtcattaacattttagcatggcccaagatgacaaactagttcttgggaaaaattaaaatactctagtgtcttgtgtaggctattcataagttcccaaacctcacctgacaaatattttaaaattatctggaatatttccaatggtaaggctttaaaatttccaaatgttgatatgggttgaaagcctgagccaagggtcttggaataacagctggtttgacgattactacgtctaagtttctggttgggaatcaaagtgaaatttgtatttattctggatgccattcttcttcttgtctcacaaatttatcctggtcagaaaaacaaagtacaagagacaagaaagaaaggaaattaaagcaagaaagagatttttttttttaaacgaagaggttgatagtacgatatgcaatagctgtttctctgtatttgcaaaagatttttggtttttttttgagacggagtcttgctctgttgcccaggctggagtgcaatggcgtaatctcggctcactgcaacctccacctcccgagttcaagtggttcttctgcctcagcctcctaagtagctgggattacagtcatgtgccaccatgcccagctaattttgtatttttagtagagacggggttttgccatgttggccaggaaggtctcgaactcctgacctcaggtgatctgccctcctcagcctcccaaagtgctgggattacaggcatgaaccactgaacctggccccacttactttattacagctaaaatttaaatagttttaaagtctctattttcatctctttttttattgtttcgaacaaaaaaagtcagtactcagttttaaataaatagaaaaacattactatgaaattttaaagctacattaatattttgactttttaaaagaatataggctgggtatggtggctcacgcctgtaatcccaacacaaaaaagtaggtggcattactattaccaattatgtgctgtataatactcaaataagcagtgaattaaagtctttcttcttttctttgttggtttttgttgttgttgttgttgttttgttgttttttttttttttgtcaaggtcttgctctgttgcccaggctggagtgcagtggcatgatgatagctcattgcagtcttgaactcttgggctcaaacaatcctcctgcctcagcctcctgagtagctgggactacaggcacagagccaccatgcccagctaaagtaaaaaaaaaaaaattgtttttgtggaggcagtgtctgcctgtgttgcccaacctggtcttgaactcctgagctcaagtgatcctcccacctcagcctcccaaaatgctgggattataggcacaagccactgtgtgttaataagactagaataaatacatgaatagtaataattcttccctcaattccaccttctgttaataatagctactggccgagtgacgtgactcacccatgtaatctcagcactttgggaggcggaggtgggtggaacacctggggtcaggagtttgagaccagcctgaccaacatggtgaaaccccgtctctactaaaaatacaaaaattaggctgggcccagtggctcattcctgtaatcccagcactttgggaagccaaggcgggtggatcacctgaggtcaggagttcgagaccagcctggccaacatagcgaaaccccgtctctacaaaaaatacaaaaattagccagggatggcagtgtgcacctgtaatcccagctacttgggagactgaagcaggaaaattgctggaacctgggaggcggaggttgctgtgagcccagctaatctgaaggctgaggcatgagaatcgcttgaacccgggaggcggaggctgcagtgagctgagatcatgtcattgcactccagcctggggcaacacagtgagacttggtctcgaaaaacaaacaaacaaacaaacaaaaaataacaataataataatagtcactgatgaatcttagaaagggcctacgcatcttgatttcaaagacaaatatttcttaaactcattaaatgcaacttattaaaatcactgattatttacttacactaaataattttttttttagacagattatcgctctactgcccgggctggagtgcagtggcatgacgcgatctcagctcactgcaacctccccctcccaggttcaagtgattctcctgcctcagcctcccaagtagctgggattacaggcgtgtgccaccactagtagctgggattacaggcgtgtgctaccacactcagctaatttctgtatttttagtagagacggggtttcaccatgttggtcaggctggtctggaactgctgacctcaggtgagccaccagcctcagcctcccaaagtgctgggattacaggcgaaagccaccacgcccgcccattacactaaataattatttaaacatgtgtaccacacagcgactttgtgtcactctattgttctaattcagaaaacaatgtcttttgtgtatacatatacatatacgcataattacaactccaatcgaaggctccttgtttctgaagtaacaactaagacattttcatcaaagatatataattgtatctggccaaaatgcattttctcctttctacaaattgctaaagtaacattgttacttatacatcttgaaatgttacatatcaacttacatcaatttaaaattggttacacatttgaaaacataacaaagaaatttagtgtttagtgaaaagtacactctgaacctcctttgaaaccataccacagcgattggggtcagtattcagtgaacacttaaattaggaggtattttaaaattatcattaaaattacacaaataggccgggcatggtgactcacgccttaatcccagcactttgggaggctgaggccggtggatcacgaggtcaggagatcgagaccatcctggctaacacggtgaaaccccttctctactaaaaaaaaaaaaaaaaaaaaaaaattagccgggcatggtggcacgcgactgtagtcccagctactctggaggctgaggcaggagaatcgcttgaacccgggaggcggaggttgcagtgagccgagatcacaccactgcactccagcctgggtgacagagcaagaatctgcctcaaaaaaaaaaaaaaataattacacaaataacaactttacacaatacagctaaacaagaagaaaaaaattaagttcacttataaacactttggtttatataatttcagacttttacatacatatatttctttttaacaaaaaagagggatcactatatataatactttgtaatctgcttttttcaatgaattctctttccatgctaataaccttctacaagtaatcatattttaatggctatgtgtcattccaccaagtaaaataatcttaatttgtttaatccataaggctgtttgtaaccttaacttttcacagtaggcgttttgtttgtttgtttgcgatggagtttcgcacagtctcctgggctggagtgcagtggcgcgatctcggctcactgcaagctccgcctcccgggttcaagcgattctcctgcctcagcctccctagtagctgggattacaggtgcccgcccccacgcccagctaatttctgtatttttagtagagacggggtttcaccgtgttagccagcctggtctcgatttcctgacctcgtgatccgcctgccccggcctcccaaagtgctgggatttacaggcgtgagccaccgcacccggccaacacagtaggtgttttaaagcatttttattacaatagcataaatccggccttggcttcttcctgtttctctgagaaatgtggacagtggggcttgggcccgtgggctcttcaaagactgtcagtcaccaggcggggacttcactgtgtcaactgtgaactacatacatgtttaaaataaatataaacaaaaatttaaaaatgataagcccaaattcttctaaaactcaagtctccacttatagttccttattttcctcactcagagctggacgtttcgtagggaaaaagcaagcttttgtgaaaattctaaaggtataatcctaaattatttctggtttccgctcacccctctagcgaataagaatcacagccccaaataataataataaaatgatgtttcatgccccctgttctatcccactaattttgaccgcgcgtgaaaggttttgagggttcaattggatgaacctccccgccccccacacctttaagataaaaactacattcacagggatgtctgttttaacataaaactcttgtaagggccccaccccatctgtcgggcagctgcccccaaacatctccaaagccgcaaactagggaagcctaaaggacaaactggtcaacaggagaatcagaccacacggggtacatgtttcgctcccttcagtccatgaaagatgaaattatcgcaataaaatactgggaaaaaaaaccctcttttaccacagattttgacagtttttccggctacagagtcacaggaaagtgggagttagtcgttttgccccaccatcctcaaatttcttagtgtttagaaaagaaaatatctcctcaagagcttcccgccaggaggcgagagggtcacactcccgtaggctccggagctgcagccctacccaccaggcgtccccgcggcctctagaatattgtagaatcttcccaagagcccccgcgggaaggaggcccgccccctcatgaatagcaagcagcctcagctctcgtagtgcccgcctccctcatgaatattgtagatcttcccagaagccctagcgggaaggaggttcccccccgcctcccgcctccccgctttatgaatagcaagagagccagctcccatggtgccctccgtctcatgaataactaacaagggcgaggttcctggagcccaaactcaggcctcagccacccttcgctccaagctgaagacaagaaggggctggagccgttacggtgtggggaaggggagggtgtagcccaagatcctgaacgtggcgagccacgtctctgctccactgcctttcccttcacctagttttgagacaatttttgagttcctcccacccccactgactccagtagggcaagttacaaggggtttcatcaaaccttttggtggaaaaaaacctccagacattcctttttaaatttgtcttgccggtgcggtggctcacgcctgtaatcccaacactttgggaggccgaggcgggaggctcccttgagtccaggagtttgagaccagcctgggcaacatagggagacccccacccccagccataaccccgctcccggtctctaaataaacacataaataataaatctgtctggaatcaaaggaagatgtgtgtctccatcctctcaagatgaaatcaagacaaatctttctagctaggccttcctggctagaagattaaattctcattcattcatttcttcattcattctgtaactatttattgaagcctgctctgggccgggcacaggagtaggccctaaggatggaatagagaacaagacagatacgtttcctgctttaatggagtttattagcctaatggggaagatagaatgaacagacagagcatctacagatgttgagagcagttccggtgagagcagcgtgacagaggaaataagacagaatgatggggtgtgtgtgtgttggcggagagctactttagatagactgatactcaaggtccctttgatatgacgatttgagaactgatggaggagaaggagccagtcaggagaagggctgagggaagagggaatgggggaaagattctacttttgtagatcaattctacattatacccaacacaaaatatataaggaactacataaagactgagtggaaatttaggattagttggcatgctgttattttatatagtcacatatattcatccatttggctttgtatctttttttttcctgacctcaggtgacctgcgtacctcagcactgcaaagtgctgggattacaggtgtgagccaccactcctggccttttttttttttttttttttttttgagacagagtcttgctcagtcgcccaggctggagttcagtggcacgatctcggctcactgcagcctctgcctcctgggttgaattgattatcttgcttcagccacccagtagctgggaccacaggtgggcaccaccattgtatttttagcagagatggggtttcgctatgttgcccaggctggtcttaaactccgaggctcaagcgatctgcctgcctcccaaagtgttgggattaaaggtgtgagccaccgggcccagccctggctttgtatccttttgcagccaattcttttttttttttttttttttttgagatgaagtctgcctctgtttcccgggctggagtgcagtggtgtgatcttggctcactgcaacctccacctcccagattcaagtgattctcctgcctcagcctcccaggtagctgggattacaggcacccaccaccatgcccagctaatttttttgtattttttagtagagatggggtttcaccatgttggccaggctggtcttgaactcctgacctcaggtgatccacccacctcagcctgccaaagtgctgggattacaggcttgcgctaccgtgcccagctgcagacaattcttttttttccccctgtctccaacattgattagaggtccttgaccaagtatcatcccgttggcagtgggccagacgcacataatggaaacaaggatccttagtggtgagaatttagcttttactcaaagtgtcatgggaagtgtcatgggaagtccttgaagagttttaagcagagagtgctatgatctgatttacatcattaaaagattgctctggcttttatgtggagaataaatgaggctaagagtggagggtaagatctgttaggatgttgcaggactagaatggtggctctgagggatgggtttgagatatattttggtggtagaagtaactgaatttacctaatggattggatatgggtggaaggaagggaaaggaaggagacaggaataattcccaggtttctgacttcaataaatgggtagaagttaatcccatttactgagatatgcaagtgaggagtttttctagtggagttttgtcttttcttttctttctttcttctttttttttttttttttttgacggagtttcactcttgttgcccaggctggagtgcaatggtgcgatctcggctcactgcaacttctgcctcccaggttcaagcgattctcctgcctcagcctctccagtaggtgggattacaggcatgtgccaccatgcctggctaattttgtatttttagtagagacggggtttctccatgttggtcaggctggtctcgaactcccaacctcaggtgatctgcccacctctgcctcccaaagtgctaggatgacaggcatgagccactgtgcccagccttatgtttttcttttcggaacaaggtctcactctgttgcccagggtggagtacaatggtgcaatcacaggttactataacctcaaactcctggcctctagcaatcctctcacctcagtgaagtgctgagattacaggcgtgagctacctcgcctggccaactagtggagaattaagagaattctagtggataattaattttccaagtggtaaatttgagatttctctgaggcatccaagtgaagatgtcatgttaaggaggcagttgaatttaaaaatcagagtgcttttggaggaaaatgtctgggctggagatatacatttaaggattagaggaatataattgtaagcattagaggaatattgacactcagacattgggaaaaggagggcaagatctcaaaggagattgaaaaggagtatctagcaaagtaaactggagaaaaccaggagagtctggggtcacagaatcctgaagcatcggtgcttcaagaatgaggagtagccctctgtgacaagtgccacccagttgagcaaggtgtctgttacatgagcattgcaggtgtctgctggatttggcaatccaatttaggtacaagcactgcaggtccaccttgtcatttcctatttcaataacccatagtaactttgccttgccaaccacctgaaactcaaatctctctgctgtttcatcagcgtcctctatgatctgttgttcacctattcattcatccatttgttacgttcaagccacgcctattttctgcctggcctagtggtagctcaggataaatacaattttggcctttcaatggctcatgctcagagcacccaacttgaataaaatgtaacccctccttcccaaatccgctactccagcaggggtggaggcggtacctcctccttaacagatttatccctacctctttgtgctaaaactcccattaaaaatgacttccctgctttctaaatctccctctgggttccactttaagattcacaccctgcatcaataagtgtgccttcttgcctaagtgatgctgtaaaccccttgagatgccttatatctcttttgtattcttcacatagaaaagaatgccaggtacagagatggatctaccgtgaggctatggaaatatcagggttccctgcttgctcaggccccttctaagtcttcttttttcttttgagacagagtctcgctctgtcacccaggctggagtgcagtggcacgatctcggctcactgcaacctccgtctcctgggttcaagcgattctcctgccccagcctcccaagtagctgggacaacaggtgcctgccaccatgcccagctgatttttgtatttttagcagagacggggtttcaccatattgaccaggctggtcttgaactcccgacctcaggtgatctgcccgcctcagcctcccaaagtgctgggattacaggcatgagccaccacacctggcccctgagccactgtgcccagccctgtaattctgtattcataaacagcagatgaagattgaagaaatatttgctgatgggctcagaattagctaacttcacatatttgttgatttattaagcttgttttattaacagggatttatgtaagggctttacttactgatcatatcattcccttgccccagagctttcaatgcctctgattaaatataagcttgttcttcaatgcctgcctcaatgtggctgcatttttaggtctccagcctatccccttaatctgaagcccccattatcatccctggtggctttgttcatgctaatttctctgctcagaaagctgtctcttccaactctacctttttttttttatagacaggatctccttctgtgccaggctggagcacagtggcacaatcatggctcactgcaacccccctgagctcaagcaatcctactgcttcagcctcccaagtagctgagactacaggtgtgtaccaccacatccaggtaatttttctatttttttagagacgaagtctctctatgttgcccagggtggtctcgaactcctggactcaagagatctgcctgtcttgtcctcctgaagtgctggcattacaggcgtgagttaccacttcttcccgctttcaccttttcccatcctaaaatatccttcgtcatttgcctctgaaagagaggttcctggaccaacaacctaactgagagcttgttagaaatgaagactctcagacaccatctcaaagctagtgaatgggaatctgcatttgaataagatccacagtaaagtttgagacatagtaacttaggccatttcacaggctacctccttgaggaatccgaaatcttttaatatccctgtaatgagacaacgtttttcctcttttgaactcttcattcattctttgctggtacttctctctgggcactttatttcaccttgaattgtggttaattatgcacaagacttagttttcctgttaggttgtgaggtctttgaaggcagtaacagtggaatctccactttgatgaattagttggcttgggaacattcacacacacacatacatacacgcacccaaatctaggtggtactggtgttttagttgatcctcagaattttgcaaggattcaaatataaattgactttcaaatgtgaatgccatgcatgggcaagatctgttgcaattatttttacttaataaaacaagcatacaactattattttatgtcatgaaagtctttaatataattttcttttcttttcttttctttttttagagacagaattccacttttgttgcccaggctggagtgcaatggcctgatctcggctcacctcaacctccgcctctcaggttcaagagattctcctgccttagcctccagagtagctgggattataggcacgcgccaccacgcctggctaattttgtatttttagtagagatggggtttctccatgtttgtcaggctggtctcaaactccccgcctcaggtaatccaccctcctcagcctcccaaagtgctgggattacaggcgtgagccactgagcctgactaatataactttctttacctttgtctggtgctgtgtgataagattatatcttcatctgtaaattgcagagtaggaagagggctagcctaaattatttaaaaacagctggttacctgtaacattctataaaaactccagggaggctgggcgcggtggctcatgcctgtaatcccagcactttgggaggccaaggcgggtggatcacttgaagtcaggagtttgagaccagcctggccaacgtgatgaaacgctgtctgtactgaaaatacaaaaattagccaggtgtactggtgcgcatctctagtccctgctacttgggaggctgaggcaggagaattgcttgaacctgggaggtggaggttgcagtgagccaacattgcaccactgcactctagcctgggcaacagcgtgagactctgtctcaaaaaaacccccaaaaacaaacaaaaaaaaactccagggaaggagattccacagattcctttgactgaaacaatattttttcggtggggaggggatggaatattgctctgtcgcccaggctggagtgcagtggtacaatctcgtcccactgcaacctccacctctgggtttcaagagattctcctgcttcagcctcccaagtagctgggattacagttatgcgccaccaagcccagctgctaatttttgtatttttagtaaagatggggtttcatcatgtaggtcaggctgatttggaactcctgagctcaaatgatccacctgcgttggcctcccaaagtgctgggattacaggcatgagccacaatgcccggcctagattttttcataaaattattaatttaggctgggcatggtggcttatgcctataaccctagcactttgggaggctgaggtgggattattgccaggagttcaagaccagcctgggtaacatggcaagactctgtttctacaaaattaaaaaacaaacaaacaaacaaacaaacaataataatctgggcatggtggctcatgcctgtagtcccagctacttgggaggctgaggcagaaggaccacttgagtccaagagtttgaggttgcagttagctgtgattgagccactgcactccagcctgggcatcagagtgagaccctgtctctctcttaaaaaaaaaaaaagaaagaaagaaagcaaattactttgaaattcccacaagaaatcagtgttcactgcagaaaaatataaaaattacacacaagtctctctattctccccatatcaatccaatatttctaccaggaggtaactgctgataacactttagtatatttccttcctaaaggactctttcctggccaagaaatatacatacatatcatcatttttcatttttactagctacatagcatttcaccataaagatatatcatacaaatttgtttaattggttctgcatcattattagattgtttccaatttttgccttttttttttttttttgagaccaagtgtcactctattgcctgggctggagtgcagtggcacgatcttggctcactgcaaactccgcatcccgggttcaagcgattcttctgcctcagcttcctgagtagctgggattataggcgcatgccactgtgactggctaatttttgtatttttagtagagacgaggtttcaccatgttgtccaggctggtctcgaactcctgacctcaagtgatacgcctgcctgggcctcccaaagtgctgggattacaggcgtgagcaaccatctaatttttttctttttaaacaatgctgcaataatcattttgtatactcttttaggataaactttcaaaagttaatttaaaaaaaaatttttttccccaaaggattcaggaataagaaatgctcttggtactattcttgctactctgcatttataaaattacctttcgaaatgtatagccttcgaagaactgagagatcatcccaatggctcttaattatcatcattgtcatcatcatcatcatcctatttctggttttaagaaaaaaaaaatatatgtatatatattttttgaaatggagccttgctctgtcgcccaggcatgatctgggctcactgcaacccctgccttctgggttccagcaattctctggcctcaccctccgagtagctgggactacaggtacatgccaccatgccctgctaaatgcctcctgagtagctgtgactacaggaacatgctaccatgcccggtttcaccatgttggccaggctggtctcgaactcctgacctcaggtgatctacctgcctcggcttcccaaagtgctgggattacaggtgtaagccaccgtgcccggccaggattcaatttttttttgagacagagtctcgctcttttgcccaggccggactgcagtggcgctatctcaggtcactgcaagccccgcctcccgggttcacgccattctcctgcctcagcctcccgagtagctgggactacaggcgcctgccaccgcgcccggctaattttttgtattgttagtagagacggggtttcaccatgttagccaggatggtctcgatctcctgacctcgtgatccgcctgcctcggcctcccaaagtgctgggattacaggcgtgagccactgcgcccggcccaggattcaatttttatgaggaagttagagtagtcaaaatcatagacacagaaagtagaatggtgattgcctcggcctggagggagagggcagtggagagttactttttttttttttttttgagatgaagtctcactctattgcccaggctggagtgcagtggtgcaatctcaagcacactgcaacctccgcctcctgggttcaagtgattctcctgcttcagcctcctgagtagctggaattacaggtgcctgacaccacgcccagctaattttatatttttagtagagacgggcttttaccatgttggccacgctggtctcaaactcctgacttcaggtgatccacccatctcagcctcccaaagtgttggaattataggcgtgagccactgtgcccgtccagagttactgtttaatgggtacagaatttcagtttctggagacaggatgtggtgatggttgcacaacattatgaatgtatttaataccactgaactgtacatgtggaaatagttaaggtggtaaattttacatgtattttaccacaattaaaaatgcatttaaggccgggtgtgatggctcacatctgtaatcccagcactttgggaggctgaagtgggcagattacatgaggtcaggagttcgagaccagcctgaccaacatggtgaaaccccattcctactaaaaaaaaaaaaaaaaaaaaaaaaattagccaggcatggtggcgcacgcctgtaatcccagctactcgggaggctgaggcaggagaattgcttgaacctgggaggtggaggcttcagtgagctgagatcgcgccactgcactccagcctcaaaaaaaaaaaaaaaaaaagcattttaaaaaagagattatatctgttaactaggataaaaattaaataaaaaataaataaataaaaaagagagtacatataaaaatgcagttttggctggtgcagtggctcacacctgtaaccctagcactttgggaggatgaggcaggtggatcacttgagtccaggagtttgagaccagcttgggcaatgtggtgagacccctgtctctacaaaagattaaaaaatattagtcggtcctggtggtgcacgcctgtaatcccagctactcgggaggctgagacaggagaatcgcttgaacccaggaggtggagattgcggtgagctgagatggcaccattgcactctagcctgggcaacaagagcaaaactccatctccaaaaaaaaattaccacgtgcctgtagtcccagctattcaggaggttgatgtgagagaatggcttgaggccaggaggtggaggctgcagtgagcttagattgctccacggcactctccagcctgggtgacagagtgagaacctgtctcaaaaaaaaaaaaaaaaaaagtctggtctcattggctcatgcctgtagtcccagcactttgggaggctgaggagggaagatctcttgagcccaggagtttgagaccaccctgggcaatgtagagagactctgtctcaattaaaaaaaaatatatatatatacatatatatgtgtatatatatacatatatgtgtgtatatatatgtgtatatatatatacatatatgtgtgtatatatatacatatatgtgtgtatatatgtgtatatatatacatatatgtgtgtatatatatgtgtatatatatacatatatgtgtgtatatatatgtgtatatatatacatatatgtgtgtatatatatgtgtatatatgtgtgtgtatatatatgtgtgtgtgtgtgtgtgtgtatatatatatatatatacacacacacacacacacacacatatatatatttgaaaaaaaaatcatctccacaaaggatacaaaaatttagccaggcatgatggcatgtgcctgtggtcccagctattggggaggctgaggtgggaggattacttaagtccaggaagcagaggttgcagtgagccatgatcatgtcactgcactctagcctgggtgacagagtgagaccctgtctcaaaaacaaacaaaaaaaatgcagtttttagacaaatacaatttaaaatatttggagatgtgattgtaaataggtctaaataggctcaaagtccactaaacgtggttgttaaaatttattagattcataaatagaatattaagatttttaacctgaatttggaagcataagggaaaacttggattttaatgtgtaagtctaataaaccaaatattaaaaggaaaaagaatatgttgcttaaaattatcataggcaagtgacagaaaatcccagattacagtactttaaacaagatagaagcttatttttctcacataaagtcctcggataagcagtcaggagtggtgtgacagctccacaatcatctgaaacccaggctccttctatcttgttgagccgcatcctcaacctgtggcttccacctcatggcccaaggtggctgcttaagctcaagccatcatgtgcacatctcagccggcaggaagtggggaagaagggacccctacacacatatacttcaaagaccagaacttagtcacatggtcactaccaatgggaaaatattttggaaggccctgtgcccagctaaaaaatagcggattctactattatataggaagacaggagcagggcacagaggctcacacctgtaatccagcactttgggaggccaaggcaggtggatcatttgaagtcaggagtttgagaccagcctggccaacatggtgaaaccccgtctctactaaaaatacaaaaattagctggccatggtggtgagcacccataatcccagctacttgggaggctgaggcagaattgcgtgagcctgggaggtggaggttgcagtgcgcagagattgtgccatcgtactccagactgggcaacagagtgagactgtgtgccaaacaaaaaaaaaaaaaagaagggaggagcagatatcagggtatgacagcagtccctgtaaaaggtaagcacatttttcatttttcatacattttaccttctgtttcccattccttaatcaatagccttttaatgtctacattaatctaacaacaacctaaaccaatttcctgttgttcttgatagagaagaaacataattgacttatgtcttttatataattgaaaacaattaaatctacttctaacttcccttctttagacaaagtagtttcctttctagcttgacttgcttcaagtttccaaaccttattccatcctgagatatttctcatcttttattgatgttgctttactttggtccctaagtttgttatctctttttcctacaaaattatacttgtttaaattgaattgaattgaaatatagtgacttcatcctatactttcgtttatttacttatttaaatactaagagtaaagctgaacaattgatgggtttttaacttcccttttgtcctccttggttttttttgttttttttttttttgagacggaggatggagtctcactctgttgcccaggctggagtgcagtggcacgatcttggctcactgcaaactcagcctcccaggttcacgccattctcctgcctcagcctcccgagtagctgggactacaggcgcccgccaccacgcccagctaattttttgtatttttagtagagatggggtttcaccatgttagccaggatggtctcggtcttctggcctcgtgatccgcctgccttggcctcccaaagtcctgggattacaggcgtgagccactgcagccggcctgtcctccttgtttttattaaaaagacggatttttttttctttctttttttttttttgagacggagtttcactctgccagccaggttggagtgcaatggcacgatctcggctcactgcaacctccacctcccgggttcaaggattctcctttctcagcctcctgagtagctgggactacaggtgtgcgccaccatgcccagctaatttttgtatttttagtacagacagggtttcaccatgttggccaggctggtctcgaactccagacctcaagtgatccacctgcctcaccctcccaaagtgctgggattacaggcatgagccaccacacccagcagaatattttctttttactcgttatttttaaagactagtcaggtgaatcataaaagttgctagcaaacataataaggcatattcaagtgatttgcatggggtagttagaaaaaatgtactgctgggattacaggcatgagccacagtgcccagcagtatatttgggaggcgggcagatcacttgagtccaggagttcagagaccagcctgggcaacatggtgaaactccatctctacaaaaattagctaggtgtggtggtgcgcacctatagtcccagctacttgggtggctgaggctggaggattgtttgagcttgggggtcaaggctgcagtgagctatgatcacaacaccgtgcagagcaagaccctgtttcaaaaaaaaaaaaaaaaaagaacaagaaaagaaaagaaaaaaatatatactaaccaaaaataaaagaatgtacaaactaaggctatgtggcacttggggccgtctcacatgagaatgtgacatggtgacaagatttcatccaaaaacatgctttggcagaggaatggtttttagggttggaaaaaaattcctcatttttcagacaagggcaccaaggcccaaggaggtaaaagcctttcccaaggttttccaccccagtatcctggcatgaagccagtttgtgtaattacatctggatcatgtcaaattttgtctgggaaagtgctatcttaaaaagtcaactataaaatcatatgtgctgtattatcctattttatgagggaaatgtacatataagtatataagagactggaaaggatggtgacactattaatatgtcagcagtagttatttttgcactgcaagattaagggaggttcaagttcttttttcttttatgcatttctgggttttctaagctatctctatcccagcctatgttatttgtgtcgttagaaaaaatatttaaaatatgcactgttgtatattattttaccacaaatggaagagatagagaagggttggaaagtagttttggatatttttaagtgggtgtcattataaactgaaagacggcaataaataagtgtattcagatatctaagccagttaatagttttgtctgggaaattaagagacagagggacaaatagcacagccgtgagtaagcattacctcattttcccaaaatcttttcctgacttctttcaaaagaagtgcactgccccatgttagtttttgttttgttttgtatttttttgagacagagtcttgctctgtcacccaggctggagtgcggtggcgcgatctcggctcactgcaacctctgcctcctgggttcaagcaattctcctgcctcagccttctgagtagctgggattataggcgaccgccaccatcacgctcggctaatttttgtatttttagtagagatggggtttcaccatgttgaccaggctggtctcaaacttctgacctcaagtgatccatctgcctcagcctcccagacagctgggattacaggtgtgagccatggcgcctgcctgcaaatttaaactacaatgtgatacactgacaacactaaatgctgaaggatgtggagcaacaggaaccctcattcattgctggtgggaatgcaaaatggtacagacactctggaagacagttaggtagtttgttttttctttcttttcttttttgaaaaattttttgtagagatgagatttggccatgtttcccaggctgctctcgaactcttgaactcctgagctcattttttttttttgagacagcattttgctctgttgaccaggctggagtgcagtggtgcgagtatagctcactgcagcctggaactcctgggctcaagtgatcctcccacttcagccttccaagtagctgggactacaggaaatgccaccatccccagcttagtttgtcagtttcttacaaaactaaatatactcttaccatatgacccagaagtcatactacttagtatttacccaaatcagttgaaaacttatctacacaaaaacctgcatacagatgtttatagcagttctattcataattgccaaaacttggaagcaaccaagatgtccttcaggaagtgaatggacaaataaactgtggtgcattcagacaatggaatattattcagtgctaaaaaaaaatgagttatcaagctatgaaaagacatggaggaaacttaaatgcatgttactaagtgaaagaagccaatccgaaaaggctacatactgtatgactccaactacgtgacattctggaaaaggcaaaactgtggagacagtgaaaagatcaatgattgccagggattggttagggggagatagaggatttttagggcagtgaaaatgctccgtatgatactataaaggaactctatgatacatgtcattatacatttgtcaaaacctatagaacggctgggtgcattggcgcacgcctgtaatcccagcactttgggaggccgaggcaggtggatcacttgaagtcagaagtttgagaccagcctggtcatcatggtgaaacccagtctctactaaaaatacaaaaattagctgggtgtggtggcacgtgcctgtaatcccagctactcgggaggctgaggcagaagaatcgcttgaactccgaaggcagaggctgcagtgagctgagatcgcgccacagcactccagcctaggtgaccagagcgagactccatctcaaaaaacaaaaacaaaacaaaataaaacaaaaattagctgggtgtggtggtgggcgcctgtagtcccagctactccggagggctgaggcaggaaaatcacttgaacccgggaggcggaggttgcagtgagccaagatcgtgccactgcactccagcctgggaaatagagcaaaactcctactcaaaaaaaaaaaaaaaaaaaaaaaaaaggataatttaaataaaatattttttctgtcctattaaatacttcttatgttctattaaatacttcttatcagacctcatgagtgcatcaccaaagacacttattgaagcaaattctgtgtgaatagaattggcaagtcagtcactgcaaagcactagacaagtatgaaaaatactcccatgtgggaaaaactgctaaaaaattaatttccagatggtcaaagttcaggcttgactcatgtggaattttttaaaaatcaaaaacactgaaacttggaaaacccagaaaactataattcttattagttgactgaaattactaagtaaacaagccacagtatcgaagagctcattactgttactgaagagctcattttcaaggagaaatgtgtgctgcaattctcccagaaggtggcagcagaaagctgtatacgacaatatgatttttcaaatgaagcggggggatatcctaaaggcagaaaactggaaagcactttagctgacacagaacactctcattttacagatgagaaagctgagttccaaagagattacctgagtttcttaggcaaaattcttcattgaaataaattccctgaggccgagcatggtggcacacgcctgtaatcccagcacttcgggaggcccgggtgggcagatcacctgagtttaggagtttgagaccagcctggctaacatggtgaaaccccatctctactaaaaacacaagaattagccaggcgtggtggcgcacgcctgtaatcctagctactcaagaggctgaggcaggagaatcacttgaacctaggaggcggaggttgcagtgagccaagatcagccattgcactccagcctgggtggaagagcaacgctctgtctcaaaaaaaaaagaaaagaaataaattccttgagagctgggagcaatggcatgcacctgtagtctagacccagcaactcaggaggctgaaaaaggaggatggcttgagcccaggagttctaggctatagtgcacataattgtgcctgtgaatacactgcaaattaaaacctgggaaatatagcaagaccctgtcataaataaataaataaataaattccttgaaatatgtcacactatgcagatttcactatgcatattatgctcagtgtaagcaaaattatttttatttttggagacagggtcttgctctgtcactcaggctggagtacagtggcacaaatcatggctcactgcagcctcaatcttataggctcaagcaatcctcctgcctcagcctcccaaagtgctcggattacagatgtgagccactgtacctggctgcaaatttaattagacataaaaatataatattaagttatgatagaaaaagctttgggatatttccagaacttcccctctctccacctttttttttttttttttttttgagactgagtctccctctgttacccaggctggagttcagtggtataatcttggctcactgcaacctctgcctcccaggttcaagcaattctcctgcctcagcctcctgagtagctgggattacaggcacctgccaccacacctggctaattttttgtattttttagtagagacagggttttactatattggccaagctggtcttgaactcctgtcctcaggtcatctgcccaccctagcctcccaaagtgttgggattataggtgtgagccaccgtgctctgtcaatctgtcaattttttttcattacaaagtcaaagacaaccaacccaaaattttaaaagctcatattacaaaacgaagaaacaccaaagcagtgttataaaatttgtgttacattaaaaaaatttatgtttaataagttagaattccaaaccaaggaatacattgcaatataactgtgccagtcataaggtaataataggacatatgaaatattaattcacagggcactaaagaaagtgtgtgggctggtattgggacatatgcttaaggctgtataatgaatatcttcatttcttcttttttttttttttcaaagcaacaacataaagttgtagggatatcttcattcttgctcatttttgagactgttgtgctctcatttggagatgacgtcaaagtttgaatttgatgaccctttgtgacaatgggggctcagctaagcagctctctggactcccattataataagctgtacatactttctgatgtaatagtagagatacttggtactttatcctagaaaaatgtttttattatcaaacatgacaggctacttatgtggctgtattttatttattttatttatttattttttgagacggagtcttgttccatcacccaggctggagtacagtgatatgatctcagctcactgcaacttctgcctcccaggttcaggtgattctcctgcttcagcctcccgagtagctggaattacaggcatgcatccccacacccggctaatttttgtgttttttgtagagacagggtttcaccatgtcggtgagggtggtgttgaactcctggcctcaagtgatccgccctccttggcctcccaaagtgctgggattatgggagtgaggcaccacgtctgtcctgaggctgtattttaggtattgttcctttgttaacgttggaaaatggccgaggaagctaatgggctgcacgcagccaaaggacatagtggcccggtttgtacccttcgaggtacctgaggagcctcagtaaaactttaccccgaaaagggccattttctccttttagccacttgcataaagaagaatgatagtttactatgtattgaaattgtccatcacaagtattttttctgagggttatggtcatcacacagcaccacaaaggcattaggaaaagaagcagtctagacaagtccaatcaagtagatggccttggtgttgacactgagccagatttacaaataaagcccaaacttaaacaacaacaaaaaaactatattgttaggaatgtcttttaaaattacatttatggccaggtgtggtggctcatacctataatcccagcactttgataggctgacatgggaggatcacttgagcccaggagtttgagaccagcctgggtaacatgatgaaaccaaaaatgttaccaaaaaatgtaaaaaatgaactaggcatggtggcacccacctgtagtcccagctacctgggaggctgaggtgggaggatcacgtgagcctgggaggttgaggctagagtgagccacgttcacgccactgcactccagcctgggtgacagagtgagaccttgtctcaaaaaaaattattaaatattgaagagatcaaaataatatttgcaaaatatataaagtaataaagaatcatgatacaatggacccttatgtattccccaccactcatgtaagaaacgtgaggaacaacatcattgtgaactttgaagtccactgggattccctcctaggtcccctcccttctttctctccttggaggtaaccattatcctgaattcatgtttttaaattcctttgtttttaattatagttttaccacatgtgtttgtattcctaatatttatatgtatataagtgcttaaaattttaacagaaatatagcatgcatacaaaatcatgcatgttggctgggcgcagtggttcacgcctgtaatcccagcactttgggaggccaaggcgaatggaccacctgagatcaggagtacgagaccagcctgaccaacatggtgaaaccctgtctctactaaaaacacaaaattagctaggcgtggtggtgcacacctgtaatcccaactacttgggaagctgaggcgggagaatagcttgaacctgggaggtggaggttgcagtgagctgagatcgcaccactgcacttcagcctgggcaatagagcgagactccattaaaaaaaaagaaaatcacgcatgaaaaaaatgatttaaggctgggtgtggtggcttatgcctgtaatcccagcacactgggaggctgaggcaagaagatcgcttgagcttaggagtttgaaaccagcctgggcaacatagcaagacctcgtctctactgaaaaaaaaaaaaaaaaattagcctggcagtggtatgtgcctatggtcccagcaacttagggtgctaaggtgagagaacagcttgagcccaggaagtcaaagctgcagtgagttatgaccattccactgccctccagcctgggccacagagggaaaccctatatcaaaaataaaataaagggtcgggcgcagtggctcatgcctgtaatctcagcatttcaggaggccaagatgggtggatcctctgaggtcaggatttcaagaccagcctggccaacatggtgaaaccccgtctctactaaaaatacaaaaattagccgggtgtggtggtggcacgcctatagtcccagctactccggaggctgaggcgggagaatcgcttgaactcaggaggcggaggttgcagtgagcacagattgtgccactgcactccagcctgggtgaccaagtgagactagggagactcccatctcaaaaaaaaaattaaaaaaagtaattaaaaaaaacaataaaatgaacacacatgaatcttttgccagtcaagcaagagaacattgtcacgttcagggagcccatgtgccacttctccaattgcatctcctttcttcttccgagagaagaatactatctggaattgtactaaccactttttatagtgtaaaatatacacaacatgaaagttaacattttaaccactttttttttttttttttttttgtgagacggagtcttgctgtgttgcccaggctggagtgcagtgtcgcaatctcggctcactgcagcctccgcctcccgggttcaagcaattctcctgcctcagcctcccgagtagctgggattacaggcatgcgccaccaagcctggctaatttttgtatttttagtagagacggggtttcaccatgttggccaggatggtcttgatctcctgaccttgtgatctgcccacctcagcctcccaaagtgctgggattacaggcatgagccaccgcacccggccaaccatttttaagtgtacagttctgtggcattaagtccattcacattgctgtgcaactatgactaccatccatctccagaactttttcatcttccccaaatgagacactgtatccatcaaacaataactacccaatcctgcctctccccagtccctggcaccacccattctactttctgtctctgtgattttgactgctccagctacctcatataggtagaatcattcaatatttgtccttttgtgactggcttatttcacttactgtaaagttgtcaaggttcatccatgttgtagtatgtgtcagaattttcttccatttaaaggctaaataatattctattgtaggtacacccacattttgtttatccattcatctgttgatggacataggttgtttctatctcttggttattatgaataattgtgctatgaacatggatgtccaaataccattagagtccttgctttcacgtcttttgggtatatacccagaagaggaattactggatgatgtgataattctatgtctaattttttttttttaatttgagatggagtttcattcttgttgcccaggctggagtgcactggcatgatctcggctcactgcaaactctgcctcccgggttcacgccattctcctgcctcagcctcccgagttgctgggactacaggcgcccgccaccacgcccggctaatttttatttttattttttttgtatttttagtagagacagggtttcaccacgttgaccaggctggtctcaaactcctgacctcaggtgatccgcctgccttggcctcccaaagtgctgggattacaggtgtgagccacagcgcctggccctatgtttaattttttgaaaaactgccacatggctgcatcattttactttcttttttttttcctttttctttttgaggcggaattttcactcttgttgcccaggctggagtgcaatggtgcaatctcagctcattgcaatctccacctcctgggttcaagtgattctcctgcctcagcctcccaagtagctgggattacaggcatgtgctaccatgcccggctaagtttttgtatttagtagagacggggtttcaccatgttggccaggctggtctcaaactcctgacctcaggtgatctgcccacctcggcctcccaaagtgctgggattacagtcatgagccactgcgcccggccctatgtttaatgttttgaaaaattgccacactggctgcaccattttacattcttaccaccaatgtgcaagtgttccaatttctccacatcttcagtaacaacttgttattttctgttttcttgacaatggcatcctaatgggtgtgaagtgatagctcatttttttctttctttttcatgtttttggtgatgctttgttttaattatcattatggttttgatttgtatttccctaatgataagtgatgttgagaacatcttttttctttgagacagagttttgctcttgttgcccaggctgagtggcaatggcatgatctcagctcactgcaatctccacctcccaggttcaagcgattctcttgcctcagcctcccaagaagcaagcccgctgccatgcccagctaatttttgtatttttagtagagacagggtttcactatgttggccaggctggtcttgaactcctgacctcaggtgatccccccagctcagcctcccaaagtgctagcattacaggcgtgagacgctgcgcccggctgagcatctttttttttttttgagacggagtcttgctctgtcccccaggctggagtgcactggcacgatctcggctcactgcaagctctgcctcccgggttcacgccattctcctgcctcagcctcccgagttgctgggactacaggcgcccgccaccacgcccggctaattttttgtttttttttttagtagagacagggtttcatcgttttagccaggatggtctcaatctcctgacctcgtgatccgcctgcctcggcttcccaaagtgctgggattacaggtgtgagccaccgcgcccggccagcatctttttatgtgcttatttttcagttgtatatcttctttggagaaatgtctattcaagtcttcaggttgtttgcttttttgttgttgtgttgtaaaattctttatctattccagatatcaattccttattaaagaaatgatttgctaatattttctcccattccaagggttgccttttcactttgttgttagtgttttggggttgtttgcatttttgtttttttgagacagggtcttgctctgtcacccaggctggagggcggaggcataatcacgtctcactgcagcctcaacctcccaggctcaggtgatcgtcccacctcagcctcccaagcagctgggactataggcacataccaccacactcgggcaatttttgtgtttttagtagagatggggtttcatcatgttgcccaggctggtcttgaactcctgggctcaagtgatccgcctgctccagcctcctaaaagtgctgggagtacagacgtgagccaccacacctagccttgatagtgtcttctgatgcacaaaagttgcttaattttggcaaaatctagcttatctatttttttgtagttgttgtttgtgttttggtgtcatatccaagaaatcatttccaaatctgatgttacaaagttttcccgtcttctaagatctttagttctttgactcacttttttttattttttatttttattttattttattattatttttttgagacagagtcttgctctgtcgtccaggctggagtgcagtggcgcaatcttggctcactgcaacctctgcctccctggtttaagcgattcttctgcctcagcctcctgagtagctgggattatagtcgcacgccaccacgcccggctaatttttgtatttttagtagagacggggttttaccatgttggtctggctggtctggaactcctgacctcgtgatctgcccacctcggcctcccaaagtgctgggattataggcatgagccaccgcgcccggccttgactcatttttaattaatttttgtacatagtaaggtaagggtccaacttcattttttttgcatgtggatgtccagtttttcccaacaccatttgttgaaaagactgtcctttcccccactgaaaggccgtggcatccttgttgaaagtcgtttgactaaatatgcaagggttttttctgggctctattctattctattggtctatttttctgtctttatgcagtaccataatcattctaaaaataatttttacctcctatagagtatctctaacctgtttattatttaattttgtctcataaattttttcagtggaaccacacagtatatatactcttgtagcttgcttctttattgaatattgcattttcacaatatttttgcaagaccccccgatacagtttgcatttttgtccctacgcaaatctgtggaattggaagagtggcctggtagtaggtgattggatcatggaggtggatttcctccttgctgttcttgtgatagtgagtgagttctcacaagatctgatggtttaaaagcgtgtggcacctccccgcttgctctctctctcctgctccgctgcagtaagaggtggttgcttccccttggccttctgccatgactgtaagtttccttaggcctcccagccatgcttcctatatagcctgtggaactgtgagtcacttaaacctctttttaaaaatacattatccagtctcaggtagttctttttttttttttttttttttttttgagacggagttttgctcttgttgcccaggctggagtgcagtggtgcaatctcacctcactgcaacctccgcctcctgggttcaagcgattctcttgccttagcctcctgagtagctggaattataggcatgcaccaccatgcctggctaattttgtattttcagtagagacggggtttcaccatgttggtcaggctggtcacgaactcctggcctcaggtgatccatctgcctcggcctcccaaagtgctgggattgcaggcatgagccacctcgcctggcctcaggtagttctttacagcagtgtgagaatatggagggtctttcatatcgatatatgtagctaaaacttactaattgttcctgatatatggcattccaataaatgaatgtaccatgatttatccattctactattgaggaatgtctgagttgtttacattattttgttattataaataatgctttaatgtatatatttttaaaagatctcctggtgcaagtgcagaagcatttatctggggtgtgtagctaaaaacagaattgctgggtcttagaaactgaacatcttcaactgacaaactgtttatcaacgtggttgtaacaatttatactctcattccagtatatatttcctgttgttccatacctttgcctaacatttagtagtaagactttattttttgccaatctgatagttgtaaattgttcttttttttttttttgagactgcgtcttgctctgtcgcccaggctggagtgcaatggcgcgatctcggctcactgcaacctctgcctcccaggttcaagcaattctcctgcctcagcctcctgagtagctgggattacaggtgcccgccaccacacccggctaatttttgtatttttagtagagatggggtttcaccatgttggccaggctggtcccaaactcctgacctcaggtgatccgcccactcggcctcccaaagtgctgagattacaggcgtgtgccaccgcgcctgtcccatagttgtaaattgtatctcattattattattattatttagagttgctgtcaccgatgttggagtgcagtgttactttcataactcactgtaaccttgaactcctgggctcaagtgatccttctgcctcagcctcctgaggagctgggactacagatgcacactgccatggctgcctaattctttttggtagagacagtggtctccctacattacccaagctggtctccaactcctggcctcaagcaatcctcccacctcagcctcccaaaatgttgggattacaggcatgagccactgtacctggccaatgatttttaatttatatttctctgattactacttaggttgggcatcttttttgtatgtttggtttgttagtctttggatttccttttttctgaaggatatacccatgtcttcccattttcccattgtgttgtctttttattgattgtgcttctttctgtatcctagataatttttagtctcttaatggtatcttttcatgaacagatgttctttagtatgaacgtagtagaatgtctcaatcttggcactattgacattttgggctggaaaattccttgttttttttgtgtgtgtgactctgtgtgtgtgtgtgtgtgtgtgtgcgcgtgtgtgtgtgttgggggctgtcctgtatattgtaggaggtttaccagcatccctggcctctgtccattagataccaatagcacccttctgcccaaattatgataaccaaaaatgtctccagacattgccgaaagtgccctggagagcaacattgcctttctgcctcctgtttaagaaatcctccactattctggtggggcgtggtggctcacacctgtaatccctgcacgttggcagactgaggtgggcagatcactggaggtcaggagttcaagaccagcctggccaaggtgaaaccccgtctctactaaaaatacaaaaattagccgggcatggtggcacatagctgtaatcccaactactcaggaggctgaggtaggagaatcgcttgaacctgggaggtggaggatgcagtgagccgagattgcatcactacgctccacactctagcctgggcgacaaagcaagacgatgtctaaaaaaaaaaaaagaaagaaaagaaagaaagaaaaagaaatcctccactattctgaggtcatgaaaatattctcttttattatcttctaaaagctttatgttatttttcacttttcatatttggattcctgattcacctggaactgaattttgtatgtggtgaaaagtagagttcgttttgtttttttctgtatagatcctcaatgtcctagtgctatttattgcacttatctaaccacaagcccccctctgttatatgtcaagtggcatggaggcaggtgtgtatttctgggctttctattgttttcagtgctctacttttctgaccttgctccaatatcacacttccgtaatcattgttgactgttaaagaggctagatctggaaaggaagtccttttattttgtcttggctattcctggtcttttgtactttcatttacattttagaataagtttgtcaaattcttcacaaaatctgttgggattttgactgagattgcattgaatctgtagatcaatttaaggagaactgacatttttataaatgtgtatcttgcattgcatgaacacagtgctctatttattttagtattctttaaatcttttaataaagctttattattttttccttagagagctctggcacatcttttgtttgatttattactctgtacttcatatatttgatcctattataaagtatctctctctctttttttttttttcgagacggagtctcactcttgtcgtccaggctggagtgcaatggtgcgatcttggctcactgcaaccgctgcctgccagattcaagcgattctcctgcctcagcctcccgggcagctgggattacaggcgtgtgccaccacgcctggctaatttttgtattttttagtagagacggggtttcaacatgttgtccaggctggtctcgaactcctgacttcaggtgatccacctgcctcggcctcccaaagtgctaagattacaggcgtgagccactacacccggctactttactttttaaactttttttttagattcagtgtctcactgtgttgaccaggctggtcttgaactcctggcctcaagcaatcctcccacctcagcctcccaaaatgctagtattataggcatgagccaatgcacccagctataacttttcattacaaaaaattgtcagtgtatatgaaaggtgaaagaacagtacaatcagcacacaaatacctagttacaacaattgttaacattttatcatttttgctttgtctatttacctttacttttttttttttaattttagagacaaagactcactctgttgcccaggctggagtacagtggtgaaatcataactcacggcagcctcaaactcctgggttcaaggagtgatcctcccacctcagcctccggagtagctgggactacaggtgcatgacactgtgcctagctaattttaaaatattttgtagagacagggtttcactattatccaggctggcttcaaactcctggcctgaagcaatcactcccatctcagcctttcaaaaggctgaggcaactgatgtcagccaccatgcctggcatctgcctgtttatctgtcaatcaatcatctatcttttatatatacacacatacatatatacattatatatctatatggagatggagtcttgccttgtcacccaggttggagtgcaatggcatgatctcggctcactgcaacctccgcctcctgggttcaagcgattctcctgcctcggcctcctgagtagctgggattatgggcacctgccaccacacccagctaatttttgtatttttagtagagacggggtttcaccgtgttggccaggctggtctcaaactcctgacctcaggtgatccacccacctcagcctccgaaagtgctgggattacaggcatgagccactcagctggccatatatatatttaaaccatttgaaagtgtgtgtgtgtgtgtgtgtgtgtgtgtgtgtgtgtgtgtttgaaaccatttgaaagtttatgtatgtgtatatatatatataaacacacacatatttttattgtctatttgattcttcctttttatgcttacttttttcttctctcttctttttgatcaattacttttcatcacttcatttttttcttatttttccccctctactagtttggaagctaaatattctatttctcatcttttagtgactgacctaaaaatttattgtgcatgcttgacttaccaaaatccacagtaaatctttatccttttaccttctcccatacaccacaatggccttagaacacttgaacaccaatcgctcaccttctgacttctatgctacgggctgtgtattttattctgtcttggtttattccatcaaggtttcattatgcacagacagaggaggagctcagtccttgtggcagctgctttcctaatgaagactggggccctgctcagtccttcccactccctcttgctgaggatgtatgtccccacccttttcttgatgaatgtgagggccagatctcccgtggatatttggaacagctccgcgggcaagttgctggcttgtttcaggtgaagcccacgcttctcagatcacgccccacaagaacctggtgtgcttggcgccatgcctgccagggggctgtgctttgtcttgctctccctcttggtcaccttatgacccttgttgaggcccacagggagtaccaagccacggctgggcctaccctgtggccctgggggtccggatggcagtggacaccctcttgttagctttttagatgttagctgtagattttgttgtagttttatgtagtcagtagcagatcagataaaatacagagttcacatgtgattcactccttcctttatctcattccttccatctgaggttacgttccttctgcctgaagtagttacttcaggctgaggtaattgatgtgagccactgtgcctggcatctatctgtttatctgtcgtttcctaagaatttcctaagaaaagggtctttggtagcaaatgattttaggttctatttgtttgatattcctcctcctcctctcctcctcttcctccttcttctcctttgttctttatagatattttcagtgggtatagagttctaggttgatggtaatttcctcagcacattgaaggtattattccatcatcatcttacttttattgttgctcttgagaaatcagctgtcaatcaaattgtttcaggctgaagttttctgactcttttgtctgtttcttttcttttctttttttttttttttttgagatggagtttcgctcttgttgcccaggctggagtgcaatggcatgaatctcagctcactgcaacctccacctcctgggttcaagcaattctgcttcagcctcccaagtagctgggattacaggcgcctgccaccacgctcagctaattttttgtatttttagtagagatggggttttgccatgttgtctaggctggtcttgaacgcctgacctcaagcaatctacccgcctcggcctcccaaagtgttgggattacaggtataagccactgcgcccagcctcttttgtctgtttctaagatctagtctctgtcttcagtgctctgcaattttattataatgtgttgaaatgtggatttccttttatttctgttatgaagttactgaggttcttgaatctgggtatcttattttccatttattttctttctttcccttcctctctctctttctttcccttcctctctctctttctcccttccttctcccctcccttcccctgccctcccctttctttttctttttttttgacaaggccttgctctgttacctaggctgtagtgcagtggtgcaatcacaactcactgcaacctccacctccaggcctcaagcaatcctcctgcctcagcctcctgagtagctgggactacaggcatgcaccacgacacctggctaatttttgtgtttttgcagacactaggtctcactatgttgcctaggctggtctcaaactcctggcctcaagcaatcctcctgccttggcctcccaaagtgctgggattacaggtgtgagcccataatcccagcagtgagattacagatacagtgcccggctcattttccatttatttttctcactgtgctgtcatctgcatcatttctttcactctgttttctctgctttttttcaccccttcttcctctgaactgccttctcttttcagttgtgtctaacctgctattaaatctgtccaatgaatttaaaatttttattactatatttttcatctccagaattgtattttttttaaaaaaaactgcttggtcatttgtatattcttttattattaattccatttgtctgtctttctttttctttttctttttttttttttgagacagagtcttgctctgtcacccaggctggagtgcggtggcaccatctgggttcactgcaacctccgcagtcccgggattaagcgattctcctgcctcagcctcccgagtagctggaactacaggcatgcaccaccatgcccaactaatttttgtatttttagtagagacagggtttcaccatgttggccaggatggtctccatctcttgacttcgtgatctgtccacctcggcctcccaaagtgttgggattacaggtgtgagccaccatgcctggcctcatttttatttcttaaaagctctaaaatagtaattttatgtcatgtttctgataatttctatatctacagtctttgtaggtctgattctgctgtctatatttctgcttcttttgctcatggtgcctagtttgtttcggttttgtgatttttgattctgtggttatttttatcaaaactatatgtgggaattttttgaggcctgagataaaggtgggttcttctagagagaattgcatatgcttcttctagcactttaggtacttaggaccactttgttttattttatttatttatttatttatttttgaggtggagtttcactcttgttacccaggctggagtacagtggtgccatcttggttcactgcaacctccgttttttgggtttaagtgattctcctgcctcagcctcccgagtagctggaattacaggtgcctgccaccaagcccagctaatttttgtatttttagtagagatggggtttcatcatgttggccaggctggtcgcaaactgccgacctcaggtgatccacttgccaggtgatccacttgccttggcctcccaaagtgctgagattataggcgtgagccaccacacctggcccttaggaccactttaaattaaaatctctgctggaggcttttcagacgattcgaccctgtgaaactaaactgcaaattgttaggactagcttttatatctttttcaggagttctttttcacttttttttttttttttgagatggagtcttgctctgtcacccaggctggaatgcagtggcgcaatcttggctcactgcaagctccgcctcctgggttcacaccattctcctgcctcagcctccggagtagctgggactacaggcgcctgccaccacgcctggctaattttttgtatttttagtagagatggggtttcactgtgttagccaggatggtctcgatctcccaacctcgtgatccacccgcctcagcctcccaaagtgctggggttacaggcgtgagccaccacacctggccctttttcacttttatgtagtaccaagaaccaaggccattttggctatagccccttgtggtcagatgtatttctagtttagcctaatagtaagggtatagctttagggtctcacctgtgtgagagaatatgcaattagaatctccatcttgggcagaccttgagttctgtcttctgtccctggagctccttaaggtcttaaaaactgaaagctactggtttggcaattgctctgtttatctctctgggtatctgttgtcacatggtttggctgaatattccttactttcattcatttatttagaggaagatatttttagtatttgatccagaatttttagttgttttcagcacgaggatcagttagggcgcctgggtcaattacaccatctgagggggacgtctggttccccctcacttatttttcaataatatccttaaagtttctttagataactctcaggtctatatgtgcattggttccaaaacctttgtacatagctttatattattgtttcctttcaataccatgtcctttaagtatgacacatacacagtgaattttagcatgtgaaactgatatatttggctgatgaagaattacataatgttaggcagagaaaaagatttcaagggcagctgaggtctgcaatgttcatgaagttttggatttttcttttttgtgtgcctcctgttttctcttatgttttaaactttaattttgaaatactcctaaatagccctgtttattttccttgttaacatttctggtaaacagaacagtttaatgtttatcaaaggaatgtttttaaggacagcatgatcacattggatagtctccattttcagcgagtctggctttgaagcacataatagaaacattttgaacatctgattctccacatttcaccagagactaggctttattttctgtgaatgcaccgattatggcagcaagagtcaagaaaacacagcgaagaggaactcaaacctctccccttccatttctcagcttgaaagggcttttctttttctcagttttttctatttcctaaagccttctctgaccagcctgggggaagccatctcccctccccctgaaagcaaacgagatggtgctcttctcactctcagtaccatcctcccacaggaccccctcaagctctatgtcttctcctacatcactttctctctcctgcctctctggcctctcctcaccgccttttcttttctatttttgccatttttaaaaaattttttgagacagtcttgctctgtcgccctggctggagtgcagtggtgtgatcttggcttactgcaacctctgcctcccgggttcaagctattcttgtgactcagccacctaagtagctgggattacaggagcatgccacaatgcccagctaatttttgtatcttaatttttatttatttaatttgtttgtttattttgagatggagtctcgctctgtcgctcaggctggagtgcagtggcacaatctcagctcactgcagcctctgcctcctgggttcaagcgattctcctgcctcagcctcctgagtagctgggattacagctgccaccacgcccagctaatttgtgtacttttagtagatatggggtttcaccatgttggccaggctgggcttgaactcctaacctcaagtgatccacctgcctcggcctcccaaaatgctggggttacaggtgtgagccaccacgaccagcctatttttacaatttttaaaaacgtcattttgtttttaaatagttttaacattttttactatctattgtatatcaactggtcatatcacaacctccttttcacctgcttctttcttccttttttttttttctttgagacagggtcttgctctgccactccaattggagtgcagtggtgcaatcacagttcactgcagccccgacctcccaggctcaaaccatcttccagcctcagcctcccgagtagctgggactacaggcacatgccaccacacctagctaattttattttttgtaggatgaggttttgccatcctgcccatgctggtctcgaactcctgggctcaagtgatcctcctgccttggcctcccaaagtgctgggattataggtgtgaaccaccacacctggcttctttcaccttcttcttaaatgccagtgctcctccaggctgtgtgagaggcccttttctcttctccttccaaacactcatccccactggtggctcatgttggtgacttatgttgatgactcacaaagattatctctaggtcggcctccccaggagctccagacctctgtctccaagtggacacctccacctggatgtcccataggcttctcaactcaatgtgtcctgaacttatttgctacccaactccccatcctcactaatatctgcttttcttcctgcttctgttcaagccagaacctggaaatcatcctagacccttcctttccctatttcctcatctcattcttcctctaaggctgaccagttctttcttcacagacagatagtcattatctgttccattacaaatgccactgccccttccaggccctccccttttcttgcccaggccactgtatttgcatcttaactagtctccctgcctcccataacatcctccttgaatccatcctctgcactacctccaggggacctccagagtgagtgttctagaatgcaaatctgatatctttcccttgatcaaaacgcctcactggtttaaaaggaaggaattagaattcttcagggtggctgccatgttcctcccacccccatcttggcacactcctctcctgtacccagccacgcctaccctgtgttccagcggagtgaattgctcacagttcccaaaggccccaggctcttgcacacaaacctcctttgctgggagtggacttcctcttgccgccgcccacttagccgggtcattgcggtttttccttccaggctcagcccaaacatcgcctcttctggaaagcctcccttgaatcccactcctctcccttccccggtctgaaaaagtgtcctcctctgtgcacattatgttttggggcatttttgccagtagaaggaagctcagtctcctgggctttgagctccttgagggcaggagcctctatcggtcccttctgggctctcaggcacctcacacggtgctgacacaacaggtgcttgaccccaagttcttctgttgatgagcgaggtgatcttgggtaaatcatttaacctccttacattttagtagagataaatgtactctacctcccaccggattaaataagatagagtgtataaaaatactttggagattgcatttcattgcttttcaaatgtgaggacttcttattaccatggatgtgcaacttcaattagtgtgctttagaaaaatgtactctgttcatttccccctccttctccggggccttctccgctccaccaaatgccctctgcctccttcctttcccatctggctgttttcttcttttccacctacaaatccattctcagctcacccattctaaaaacaagtcttcctcccatccctcctccccctcgagccacagtccttcctttcttccccccattgctgccaaagcccttcaaagagtgttttactggcggcttccggatctcaccacccacttctttcttaatcggcacaatctggatccgccctcagcacgtcacagtccgtggatcctctgagaactcctgtgacctcctattgctgctggattgcaggctcttctcgggcttgatcttggaagcatctggccctgctgaaaccctcctccttggcgatagggatcctgaactttccccattttccttttctctctccaacagttgcttgttctcttcccgtaagtgttggcatcctcgagactcttgccctttggcctcttgttttctctccttcctgcttcgtgatctcacccactcccaggactgccatcaggccctctttgcagatgtcttcccagactgccgtttagcactgagctcctttctgagctgtcggtccatgtatccagctgctggctagacagctacatttgatggtcctgctggcacctgaaactcaaaatgtccaaaatgaaaatcatccatggctgggcaccacggctcacgcctgtaatcccagcactttgggaggctgaggcaggcggatcacttggggccaggagttcacgaccagcctggccaacatggtgaaacctcatctctactaaaaatacaaaaaaattagctgggcgtggtgatgcatgcctgtagtcccagctactcgggaggctgaggcacaagaattccttgaacccaagaggcggaggctgcaatgagccaagatcatgccactgcactccagcctgggcaacagagtgagactccatctcaaaaaaaaaaaaaaaaaaaaaggaaaatcatcctcatactgcttttcccaccgaaccacttcagttcccgtttgtcttatttctattaatggtgccctcattctcccgatcgtctagaaattcctcactcttgctttcctcccacatcaagtcacttgccaagtcctatagatcctcttacagaagtatctgtggtttccccaccttcgtgtttggagtgccctccagaaaggccttcattacctctatctaaaccatctccatagccttacaggtttggctttcataattttttttctacttccttcccttccccctccctcctccctccttgtctctctctcccttccttttctgtctttctctctccttttcaataaatatttattgagcacctactatgtgccaggcactggaaaaataaaaagttaatgcagtgcagtcccattcccaagattttgaaagccagcagagcacttatttcaagagccctgcattccggtgggggccctgcagaagtaagccacaatcacaatagggtgtaattgcacttagggccttccagctggtctcctggcccccatttcttcctccttcccaatccatggtgttattaatttgtgttagattaatattcctcaggtcttgtgacaattccgccagtccccttcattggctgtccattgctatgtctaagtcctcagtacatttttatgagtttttaaaaatttccccatcctgcttctctacatgcgtctccagggttctcctctcctgctctccaccacccatcgtttactgggaattctctgaaaatgcattgttcctgcccctgtgcctttcttcttataattccctcctccatcactctggctgtaaaaattctaattatcgccaggtgcggtggctcacgcctgtaatcctagcactttgggaggccgaggtaggcggatcacttgaggtcaggagtttgagaccagtctgaccaacatggtgaaacctcatctctactaaaaatacaaaaagtagctgggcgttgtggcgcaagcctgtaatcccgctactcggtaggctgaggcaggagaatggcttgaacctgaggggcggaggttgcagtgagccaagactgcaccactgcactccagcctgggtgacagtgagactccaactcaaaaaaaaaaaaaaaagtcctaaccatgggtctattttgagccgtgactccagcaggtataactcttccctccagcagtgcttccaaccccctcgtcattctcactgtggcacaaaacgaatgattcaaccagcaaaccatctgctagagtcacagagagctgcagcaacccccagctttgtggggttaacaagcaaaccctgagagccatctccaccagcaacaagggtcccgtgttaggggcagacgtccctgagcagtcaggggaaaccttgcacttatccaagagcacaaataggaccaaagcccccaacacgccataagggccatcagcagcatcatcgcgaggagggactgcagagtagaacccatcgtgtggcctctagagtccatagtacatggctgggtagagcaaactgctcacagttctggggcacattctacatctcacatgccaccagctcctcccctatgctttcctgattttctcatcacacgttgatgctactgcttttccgtattgcccctcatgacatctgctgtggtatttggtaccttttgcctaggagatctactttttttttttcttagacggagtctcactctgtcgcccagtctggagtgcagtggtgtgatctcgactaattgcagcctccgcctcccgggttccagtgattctcctgcctcagtctcctgcgtggctgggattacagtcgtgcgccaccatgcccagctaatttttgtatttttagtagagacggggtttcaccatgtcgggcaggctggtctcgaactcctgacctctgacctcaggtgaactgcctgcttcagcctcccaaaatgctgggattacaggcgtgagccagcgcccccggccaagatccacttctttgtgtaccttttttttttttttttaagagagaggatctagatctgtcacccaggctggagtgcagtggcatgatcacagctcactgcactcaacctcaaccaccccagttcaagctctgcctcagcctccctagtagctaggactacacgtgcacaccaccatgcccagctaatttttaacattatttttggtagagatgagggctcactatgtttcccagactggtcttgaactcctgggctcaagcgaacctcctgcctcagcctcccaaagtgctaaggttacaggcttgagccaccgtacctggctctttgtgtacttttgtctcatccaccctaactactaaactcccaagcttgttaggacagtgatcacaagccctggagcatgggagaaggagattactaagtatccgtggactccaatgcagggagatttcttccatggcaggataggggaggaaccatagcctagtcttggtactttccagggtgactctcagggtggcttacacacacacacacacacactcacccacactcacacactctttctctcactctctcttaagaaatgctgctgattgataggtttagcctctgaagggagtatcttctcttccctactattccagcacagaatagaattttgaaccaaatgggaatctgaactacaagaatctaatcaaaattttaaaacctgagtgttaggttcttggcacatctgaaagcacctagcttaatgtctgagacataggtatgttcagaaatgtgaatcttatcacacacacacacacacacacacacacacacacacacacacacacaccagggaaccatgtaacaggttctgagacagcacagccggttacatctggtttccagtaggcatgcctttctttctttctctttcctttccttcccttcccttcccttccctcccctccccttccctcccctcccctcccctttttcttgacagagttttactcttgttgcccaggctggagtgcaatggcgcgatctcagctcagtgcaacctctgcctcccgggttcaagcgattctcttgcctcagcctcccgagtagctggaattacaggcatgcaccaccacacctggctaattttgtatttttagtagagatggggtttctccatgttggtcaggctggtctggaactcccgacctcaggtgatctgcccgcctcaagtgctgggattataggtatgagcaggttttctttatggatcaattgatgttacttaggggtaacatgcagaatagcttgttccacggggcaaggtggacagatccttgtgattaaggggctgcccagtgggcattcctggactcagcagacaatgactatgccccacccaccacgttatgctaaaatgccacaagacatccgaagaaatgctttcttcctttgggggtaatgcaaatattgccatttttctgtttcaaagaacaacaagacattttcttggtaatctctcacctaaagatattattttgagggggttaagaatgtctttatcttttagagacacatgttgaactgtttatgggtgaaatgacatgatatctaattttcattaaaaatgacttaattggccatgcgtggtggctcatgcctataattccaacactttgggaggccgaggtgggtggatcacctgaggtcaggagttcgagaccagcctggccaacatggtgaaaccctgtctctactaaaaaaaaaaatacaaaaagtaggccgggcatggtggctcatgcctgtaatcccagcactttgggaggctgaggagggcagatcacctgaggtcaggagtttgagaccagcctggctaacatggtgaaaccctgtctctactaaaaatacaaaaattagccgggcgtggtggtgggcgctattctggaggctgaggcaggagaatcacttgaacccaggaggaggaggttgcagtaagccgagatcgcctcattgcactccagccttggcaacaagagtgaaactccatctcacacacaaaaaaaaaaaattagggagaagggggagatgcaacaagagtggccctgtgttgatggttattgtaacttggtggcagatatgtggtgattcatggtactagtttgtagaacttttgtgtatattagaaatttgccataacagaaattttgtttgtttttttagagcacagattttagagcagaacagacctgggttcaaattccctctgggttcaaattcctgctgttttgtctgggcaaccttcctatttaagtcttctgaaccctgtttccgcgtttggaaaacactcataagaataattctcagttcacaaatttgttgcaagtatacaaagcacttaaggcatagcctggaacatgattggcaatcaataatcctacgatagctttacttgagcctgaccatgctagctatataaactgtacagctatggtttgaatgtcccctccaaaactcatgttgaaatttaattgccattgtgatggttctaagaagtaggattattaagaggtgattaggtcatgaggactccacccttatgaataggttaatgttgttattgcagaagtgggtttgctattgagagggcaggttgttataaaagcgaatttggccctctcttgcttgctccttctcatgctctcttgcccttctgcctttcactatgggatgaagctgcataaaggacctcaccagatgctggtgtcatgctcttggacttcccagcctccagaactgtgagctaagtacacatctattcctagtaaatttcccagcatgtggtattcagttatagtagcataaaacagatgaagacaacgacttttgggatcagcctgcaatcatggttactggcagaaggctggcctgaggtacaagtacaaattatatacttcagaccctttactgaaactcctggagggcatttattttattattattaccttatttattttttagagacaggatatcactctgtcacccaggctggaatgcagtggcacaatcatggttcattacagcctcaaccttctgggctcaagtgatcctcctgacttagcctccaagtagctgggacttcaagtgcatcccaccatgctcagctaatttttagcttttgcagagactggggggtgggtctctctatgttgctcaggcaggtcttgaactcctggcctcaagccattctctcatcttggcatcctagtgctggtattatagctgttttgagccaccatgcctggcctcttttattatttttcaatgtggaaagtagagatgagagaggacaggggcaatggtggggtttgttcctgggttcacagctctgctgtcactgtgagggagctacagaggtggggaggggcagaccaggaaagcagacccctgaaatacaatgtcatttgcagatccagcctcttgttttccatcctggacattcttccattaccaggcagccaacacttcccaggctgtcctgggactcgcagttctgtctacctgggcacagtttcaggctccagctggcaaggcagccccatcactttctgcagaggagcatgtgctggaataggagacagtgagatcacaggaattcattagcatcccatattcattttcttttcctttctaggccttctccccaaccctctacccgacacccacctcagtcattttttttttttcccttagagtagctgggggaatctgtcaaagccagttcaggagcttgccttttctggtgtcttttctaaaactacggcattcagccctcaccagatgggaacctatcagctcagcaggcagataattattctttcaagggtgggaggccctaccatgaatggaaattcaggcatttctgcagctgaggccccaaagccccatcatggaagcagtgcacatacagcagacaagctttacctgggcaagtctgcaggaagtgctggtcagtggaggtgcgaggagtgagatataggatggattcgtgttcccttccccatgaagcagtgtggaacccactggacccactcctgaagtctctccttagggaccagtgcaagccagcccagttttggtctggctgaagggggtcacctcctctgtgaggatccagaactcaagatcagatattaggatgcacagatttctcctcatttgatggaggaaaattctaataaccagctgccaacagtggagcatgctgccaggaaggtaatgagctccctgttgttggaagtattcaagcagatgctggctggccaccttccaaggatattgcaaaaagaagacctgacatgaatgagagtttgcctcttatgtcctccaaagtctctttacctttattggttctcatggtgtaaagggtgaacttggagtcaccataggcccagggttcaagtcctggctgtacagctagctggctagatggccttgggcaagacacttaatttctttatgaaattatataggtatattttatttttctgataatgggtgataattataaaaaaaaaatttattggccaggtgcagtggctcgcacctgtaataccagcactttgggaggccaaggcaggtggatcacaaggtcaggagaccgagaccatcctggttaacacggtgaaaccctgtctctactaaaaatacaaaaaaattagctgggcgtggtggcgggcgtctgtagtcccagctacttgggaggctgaggcaggagaatggcatgaacctgggaggcggagtttgcagtaagccgagatagcgccactgcactccagcctgggcgaaagagtgagactccatctcaaaaaaaaaaaaattattatggacactttctatcctaatatgtacagttttaatgtatcttttttaatttttaatttttgtgggtacatttttaaattttgtgggtaattttctgggtacatatatacagtaggtgtatatatcgggtacatgagatattttgatacaggtatataatgtgtaataatcacattagggtaagtggggtatccatcacctcaagcatttattctttgtgttacaaataacccagatacactcttttagttattttatttttttttttttgagacaggatctttctctgtcacccaggctagagggcagcgatgtgatcacagatctctgcagccttgaccttgctcaagcaatcctcttacctcagcctccagagtatctaggaccacaggcgcctgtcaccatgtctggctaatttttgtattttttgtacagttgaggtttcaccatgacgcccaggctggtcttgaactcccacgttcaagcaatcctcctgccttggcctcccaaagtgctgggattacaggcgtgagccaccatgcccagccttctttaattattttaaaatgtacagttaaattattattgactataagtcatcctgttgtgctatcaaataaagatcttattcattctttaactatttttttgtacccattaattatctctgataggataggaggcagggaaattctgggcagaagagggcaggtccctggtgagggccccgtcctcaagcctggaactgcagtgcaaagtgagaacatgcattcctgttttcctgctcaaatgttgcctttataaaaccacccatggcccaccctgccccctatcctgtggccataaacacctaggctctgccagcagagaagaggagaaaagaggagaaaaggagaagcagcgggatgtctgagactatgagttggatgttacagagaagtagcttgacttcagagggacagcttgacagcattgcttcggagatgagtgcagtgggggatggctggactccaggggaaggttatcttcccactccatccccatttcagctccccttcccactgagagccactttcattggcaattaaatccccccaacttactatctccaattcttttgtgtgacctcattcctcctggatgccagacaagaactcaggtgcgagtacaaaagacactgaccccccactgagctgttaacacttaagctgtccgtggatggctaagctaaaagagcgctgactgtaactctttctggggcttcaggggtcatgggcatctccctagaggctaccgcaggactgctcagagttttgcttctcctggcacccaaaagcgctcgccccgactgctgcactcactcacctgtgcttcccctcctgcaaggcgggggacaaagcaggactgagtgagtggagtctgtccttgccagcaccggcaccctagcggccggctagttctagtgcccatgcactccggttcccaccggtgaaggggttggggacatttcctgcttcatcctcacttcccacccacccctgactgcccttcccagcctctggtaaccctcaggctactttttatctccatgagttcaattgttttaaaatttttagatcccacaaataagtgggaacatgtaaagtttgtctttcctggcttatttcacttatcctttttaatagctatgtgcctaagtcctttaaaccagtggtccccaacctttttagcaccaggaactgattttgtggaagacagttcttccaagaactggattgccgtgtatggctttgggatgaaactgttccaccttagatcatcaggcattagattctcataaggagtgtgcaacctggatccctggcatgcacagttcacaatagggtttgtgctcctatgagaatccaatgctgccactgatctgacaggaggcggagctcaggcagtaatgctcccttggctgccactcacctcctgctgtgtggctcggttcctaacaggccgtgaactcgtgcaggtctgtggtccagcagttggtgatctctgctttaaaccatggcttcctcacctgtaaaatgaaataataatgaaattgtgaagattacataaatattaaataatgaaacacacataacacgcttagcgtttagttaagcatctaaaacatgttgataggccgggtgcgggggctcatgcctgtaatcccagaactttgggaggccgaggcgggcagatcagttgaggttaggaattcaagatcagcctggtcagcatggtgaaacctcacctctactacaaaatacaaaaattagccaggcctggtggtacgtgcctgtaatctcagctactcgggaggctgaggcaggagaattgcttgaacctggaaggtggaggttgccgtgagccaagatcgcaccactgtattccagcctgggtgacagagtgagaccctgtctcaaaaaaaaaaaaaaaaaaaaggtcattgatcattatttgaaaacagccctgactcctagaagtatgaggtaagtctcagatgtaattaaaaattttcttgtagccacactaaaacagtaacaaacaataaacaagtgaaattattattattattttttgaggcagagtctcgctctgtcacccaggctagagtgcagtggtgcaatctcgacttactgcaacctccacctcccgggttcaagcgattctcctgcctgagccttctgagtagctgggactacaggcatgagccaccccaactggctaatttcttgtatttttagtagatacggagtttcaccatgttggccaggctggtcttgaactcctgacctcaggtgatccacctgcctcagcctcccaaagtgctgggatcacaggtgtgagccactgtgccccaccaaattaattttaataatttacttaacccaacgtcctcaaaacatgtaatcaatataaaaattattaacgagatatgtttataatcttatttttgtgccaagttttaaaactctgttgtgttttttgcacttacagcacatctcagtttagactggccatgtgttaggtgctcaatggtcacatatagctagcagctgccatattgaacagtgcagcactaaatcttctatcttcgctctcctttgatttactgtaactctgacagtgtagtctgtgtggtgttatgatatatattggttttcatctatggttctgaaactgccattgcaaaattataactgagacagtgaaagcaatctgacctaaccaactccatcttgcttctaacctccaagctgtctttgttcattcctaggagtaggccaaactaaatttgggaggagcttaaatttatagttttactttgaaacaaagatgataacagctcattcccctaaacaaacccccttcttgcctggggaccagactgcctttgtaggactaacaaattagccgaaagattagaaattatggtttaggagccaggcagctggaggctacaagattctaaccctccccaaattgctcctggggacaacatcactattgtaagaagtaagatcagatattttacagattctgcacttgatggatcagctggcatcacccagatcaataaactggctcatgtgatcttgtggacccactcaggaactgactctggaagaggacagctttaactccctatgatttcatcttcgacccaatgagtcagcacttccgactcactggcccctccacccaccaaattatccttgaaaactctgatccctgaatgctcagggagactgatttgagaaataataaaactctggtctcccacacagctggctctgtgtgaattactgtctctattgcagttcccgtcttgactaacgggctcggtctaggcagcaggcaaggtgaactcgttgggctgttcctggctgataactcccagagcccttcttacagtcttgttagaacattgggtatgttaggcctcaggggcaggcctctgaccttctcctgccctcctttcacctgaatgttcccctgatttcatgactatgagtctgaagaccacaccctgggggaaggaatgctgacatcgtgaagcttccataaaaacccaagaggccaggcttggtggctcacgcctctaatctcagcattttgggaggccaaggcaggaggactgcttgaggccaggagtttgggaccagcctgggcaaagtggcaaaattccatttctactaaaaatacaaaaaagtaactgggcctggtggtgcactcctgtagtcccagccactcaggaggctgaggtgggaggattgcttgagcctgggaggtggaagttgcagtgagccgagattgcgtcactacactgaagcctgggtgacagagcaagaccttgtctcaaaaacaaaacaaaacaagccccaagaggacagggcccagtgagcttctggatagctgaacactggagcttcctggagggtgatgggcccagggggcgcgtggaagctccgtaccccttcccccacacctcaccctacatgtctcttagatgggatacttccctcaacccccttcgcgagtgggaactggagtggcttgttgcactcagcctgtcactgaccactcctcatgggagggaaagtgtgagtgaataagtgtgggaacccgaggggacaaatgctggaaccggccattcgctcctctctggctgcatcaggttctgtgtgggccccgcacagcgtccaagcatgttacaaccaatgctctttcagttctgctgtccagggctggtcgagtgccaactagctcagtggagggtcagagtgggagcccctgccctctcggcacccagattcttgtccagcatccaggaagaataagctcacatgaactgtttgaaatgtgatgaatggccgggcgcagtggctcacgcctgtaatcctagcactttgggaggctgaggtgggcagatcgcttgaggttaggagtttgagaccagcctggccaacatggtgaaacctcgcctctactaaaaatacaaaaattagccaggtgtggtggcgcgtgcctgtagtcctagctactctggaggctgaggcacaagaatcacttgaacccgggacgcggaggttgcagtgagccgatgtcgtgccattgcactccagcctgagagacagagtgagactccgtctcaaaaaaaaagaagtgatgaatgcggaagactttattgagtggtgagtgactctcagtggaaagggaggctggaaaagggatgggaaggtgatctttccctgaagcctggccgtctccagctgggcccctctcagaagctgcaccatctgaagttagctgcatctatccgtagtctccgatgctcagttgcttctctggtcacagctcacatgcttgtatcctgaccctcagccacttgtgttgctgtgccagctgaagtcttttatgggaacaggataggggcggggcaggccaaaaaaggcaacgtttgggtggaagaatgggttcagctgttttcacctagggccatggttccaggcttaagggtggggtttagttgggagcccagcccttctgtatcatcttcatctgtatcctttgtaatatccttctaataaaccagtacatgtaagtgtctccctgagttctgtgaactgattcagcaaattaattgaacccaaagaggggtcatgggaagcctaacttgaagcctgttggccagaagttctggaggcctggacttgcgactggtgtgggagtggggcagtcttggacactgagcccccagcctgtgggatctgacactatctccatgtagatagtgtcagaacagaattagaggacacccagctggtgtccagtccttggtgtgtggaggcaaacctccacacacatggtcacagaagccttctgtgttgattgttgtggtgtgagagtagaggaaaaacatggttagagagagtttgagctgggaaccgtggatattacctaatctacatcatgacaccacatcctgcttacccatggattaggttcacgtggctcattgctttcatgtgatttctttttttcttttcttttctttttttttttatttgagacagagtgtcactctgttgcccaggctggagtgcactggtgtgatctcggctcactgcaacctctgctgcctgggttcaagtgattcttgtgcctcagcctcccaagtagctgggattacaggggcccacaaccatgcctagctaatttttgtatttttagtagagatggggtttcaccatgttggtccggctggtcttgaactcctgacctcaggtgatccacccacctcggtctcccaaagggctgggattacaggcgtgagccactgcgccagcctcttgtgatttcatcttgcctcactgactccacagtaagcactgtaagtgcgactagttcttgttttctgtattttcagaactgctttcctgggcccaggataagtgcccaagaagcgtgtttggactgacatccttgggaatccaacaatggttaaagataaccacttcctttctacctgctgatgtggagcacatatgaggcgctaagcaccgcctgcaccaggcgagccattcagtaaatgttagctcttattgttctcttattggtggtgggcagagttgaagttctgatgagatcttctcagaagggttacattgcaggggggccttggaaaatcattcagggctctgagattcagtttccttcatccctgaaatgggatgcgaattccccccttgccaacctcaaagaactagtaggatggtgcaaaagtaattgtggtttttgccattaaaagcaatagcaaaactgcattacttttgtaccaccatgcccagctcattttttgtatttattattattattttttttccgagacggaatttcactcttgttgcccaagctggagtgcaatggcgtgatctcggctcactgcaacctctgcctccagggttcaagcgattctcctgcctcagcctcccgagtagctgggattacaggcacccaccaacacacccggctaaattttttttaatttttactagagacggggtttcaccatgttggccagactgctctcgaactcctgacctcaggtgatacacccacctcagcctcccaaagtgctgggatttcaggcgtgagctaccacggccagcctaattttttgtattttaatatgatgatcagatgagatattctgagaaagtgtttagaaaactaaggggatccatcaatctaaagtatcattaaacttgcactgagctcagcatcatgcttgggcttgggcagggggagagaccgcagcgggtgccgggacggccccatctctgcatgcgctctgcttgccctgcctttaagacttgaacgtgtgaaagtgccttgaaagctgtaaagtcctatccaagggatccttttatgatgagcaggggtggaggcgggagtgggagtatcagctatgccagactgacgaggagctttgttttactagagtgcaggaaatacaactggtgcaagagacctgcattcatccaggttcttgtaattgctgggtgtcaaatccacacagttgcttgaaaagaagaaaccaagatggaagtaacagaaaccacagaggtggttatgtcttttaataatcagacccaaggaggagaactgagagaaagcttgaaggaaacctgcaggagcttgtctgcttctctaaggtctcaaaggcagaactacttcctcaaaaggccttttggtaaatcaccataaacaaaggaaagcggaaattcctttaagctttttggtgcttgattctaatccaccctgagccatggtcccaggcctcctacgctccttgctcctccgatgtttatatgacagaaagttattttccccagaaactgacaatctggattgcaaagaccaggccaggaaggaatttattccagaaacacttgcagtgtctggcactttgctccccatttcctcattttgtgttgtttgtttatgcagtggaactgcctatgagtcatatatttgggtgctgaggatgaagagttaatttggatgaagagttaatccagagcaaggtcacaactctcttgaattctatgaaggctgagaggggtgatgaagcttcagaagaaaagtttgaagctcgcagaggttggctgaaggaatgaagctgtctctgtaacataaaggtgtaaggtgaagcagcaagtgctgatggagaagctgcagcaagttgtcgagagatctagctcagatcactgatgaaggtggctacgctcaacaacagattttcaatgtggatgaaacaaccttctattggaagaagatgccagctaggactttcataactagagagaagtcaatgcctggcttcaagggataggctgaccctcttgataggggcaaatgcagctggtgactttatagtcttttacctttctagaaatcctagggcccttaataatcatgctaaatttactctgcctgtgttctataaatggaacaacaaagcctggatgtcagcacatatttatagcatggcttagcaaatattttaagtttactgttgagacctactgcttagaaaaaaagattctttaaaaaatattactgctcattgacaatgcacttggtcatccaagagctctgacggaaatgtacaaggagatcaatgttgttttcatgcctgctaacacaacatctgttctacagcccatggatcaaggtgtaatttccactttcaaatcttattatttcagaagttcattctgtaaggctattgctgacatagatggtgcttcctcttgggtgggcgcggtggctcacgcctgtaatcccagcactttgggaggccgaggcaggcagatcacgaggtcaggaaatcaagaccatcctggctaacatggtgaaaccccgtctctactaaaaatacaaaaattagctgggcgtggtggtgagtgcctgtaatcccaactacttgggaggccgtggcaggagaattgcttgaacccaggaggcagaggttgcagtgagctgagatcacgccattgcactccagcctcggtgacagagcaagactccatctcaaaaacaacaacaacaatttagaagaagttgattccaatgcttatggatgactttgaggagttcagacttcagtggagagtaactgcagatgttgtggaaatagcaagataaccagaattagaagtggagcctgaagatgaaactgaattgctgccatctcatgataacacttgaatggatgaggagttgctccttttttttttttttttttttgagatgaagtctggctcttgtgccccaggctggagtgcagtggtgtgatctcggctcactgcaacttctgcctcccgggttcaagcggttctcctgcctcagcctcccgattagctgggattacaggcacttgccaccatgctcagctaatttttgtatttttagtagagatggggtttcaccatgttggccaggctggtctcgaacttctgacctcaggtgatctgcctgcctcagcctcccaaagtgttgggattacaggcgtgagccaccgcgtcaggccaggagttgcttcttatggatgagcaaggaaagtggtttcttgagatggaatctactcctggtgaagatactatgaacattgttgaaatggcaacaaagaatttacaatattccataagcttagttaataagcagcagcagagtttgagaggatcaactccaattttgaaagaagttttactgggggtaaaatgctatcaaacagcagtgcatggtacagagaaatcttttgtgaaaggaagagtcaatcaatgtgacaaacataactgttgtcttattgtaagaaattgttatgaccacccaacccttcagcaaccactaccctaatcagtcagcaggcatgacattgaggcaagaccctccaccagcaaaaagatcatgacttgccagaggctcagatgattgtcagcattttttaggcaatattttaaagttaaggtattgatagcggcaggaggcagacagatcctaggcagacaggggtgggtccccaatgaaagctgacctccaaaccagacagtttaaaggctgaaagccaagctacaagtcttggataaatccgtggacagattgagaacctctctttctgtttggcacgctttcctctgatcgatccctgcctttaacctattttacatatgcctactcttccctgtttttttacgctgtgcccatctttaagtggtgcctttttttttcagcctttttggcatactcacaaaccagtcagcacacactctcccattctgaacccataaaaatcctcttcagtcctggttccacttcctgtaactgaaacaattacctgcgaggtattatttaacttttggactatgatgtttctaacctgtgaccatttcacatagccattcaaatataaaggtacggtaaagattatgaaacgggttgggtgcagtggctcatgcctgtattcccagcactttgggaggccgaggtgggtggatcatgaggtcaggagttcgagaccagcctgagcaacatggtgaaacctcgtctctactaaaaatacaaaaattagccaggcgtggtggtgcgtgctgtaatcccagctactcaggaggctaaggcaggagaattacttgaacctgggaggcagaggttgcagtgagctaagatcgtgccactgtactccagcctgggcaacagagcgagattccatctcaaaaaaaaaaaaatgaaacagttacttggtatcattttgtaagtaatgagtttttagtgctctttggacattgagaccatttcataagatttaggttttgagaatttcacagcataaagcccatcactgatgcagcaatgaaggaaatgttctacaactcaacagacaggtgagaggagaaatgtaattcatattagatttatttatttactgaacttagagcctggggttactactcgacccccactgttatctagtttaagtgttcttttctactttagcacatacacctagtttctgtgttttttgccttttataaatacagaaaagagaataatgttttaaaataaaatcaaggaaaggcctaaggcacctgagagggttttgtttttgtttttgtttttttttttttcagtgaaatgaagggaaattgttgccagcaagaactgtggcaaggttatccaaggtgacaaatgtctgtaccacccagcagctccgagtccttctgaagcatcctggttgtccagaaagactccaccgtgactcatgataccggccagtcttcccggtagcactcaacattcgaaaattagtcttcatttctccttcccaacatgcatttctccttctcttcagttggagaaagtaatttaatttttttttttatagagtctcgctctgttgcccaggctggagtgcagtggcgcaatcttggctcactgcaagcttcgccttctgggttcacgccattctcccgcctcagcctcctgagtagctgggactacaggtgcccgccaccacacccggctaatttttttttttttgtatttttagtagagacggggtttcaccgtgttagccaggatagtctcgatctcttgacctcgtgatccgcccgcctcggcctcccaaagtgctgggattacaggtgtgagccaccgtgcccagccttacatcaccaattctttcttatatgtctattttttaagtgtagtatatgattatattcatgaaattcaaatgatacaaatgaagtcaaatctatttgtattagaaattaataagaattaacagtaaagttaattctttattgatttgcacacctatagttgcagctacttgggaggctgaggcaggagaatcgcttgatcccgggacgtggaggttgcagtgagccaggatggcgccactgcactccagcctggtgacagagcgagactctgtctcaaaaaacaaaacaaaacaaaaagaattgatgatgtaagaaatccacaggaatgtgtaaattatttcaagaattaacactcagtagatacttgcattcccaaataagcttataaatgcagatgaacctctagttgttttagttgcttgtaaaattcatagaggtacgtgtatttcttcatttaacacgggttagtcacttggggagggggatgggtgttgggttctttttacctgttcttcaggtcacatactcaagcaggagctactgaatgggaagactgaaacaatttcttttctttgcacacttggtattgataaatgtcaggtgtatgcaaaataaaatctctggcaggttgtgatatttatgggtctatctcttgtgactgtagtttcgtctcggcaccagacataaggcagttcaatgtcaggccattgccctaaacagttcccgatgccaagaactgacaaattgctactttggtttcaatggatggtcaaaagggatcatcagggcaaaccttgtagattttctttcaccaaccctattctcctttcaacattgaaatcctagactttagacagaaatattgaactgggttgtagtgaggagatatgagaggcctcctgccattgaggataagtggatatgtctgaattggcctgctacctagaattaataatctcaatcacttggagggtggtatccataattttctccactatttgtgccaccacacccggctatttttagtagagatggggtttcaccatgttggccaggctgttcttgaactcctggcctccacctgcctcagcctcccaaagtgctgggattacaggcatgggccaccatgtccagccaaccaaacctttttctctttttctttccttttctttcttttcttttctttttttttttttttgagatggagtttcactcttcttgctcaggcgggagtgcagtggtgtgatcttggctcactgcaacctttgcctcccgggttacagcgattctcctgtctcagcctcctgagcatctgggattacaggcatgcaccaccacacctggctaatttttggtatttttagtagagacggggtttcaccatgttggtcaggctggtctcgaactcctgacctcaggtgatcctgccgcctcagcctcccaaagtgctggtattacaggcgtgagctgccgcgcaggccgtaagtatgattcttatacaataatcagcggctttgctgtgaaccttggaagtggtcatgctattgaatggcattgtttgtattccccattcacttctacagtggcacaaatgttataggctgtgcctaaaggaaacctgatgattaacaaagagtccctgaacagagttgctcctgcttcacagtgctgaaggcttagagactgagagatcctaattaagttaccacagacctttatttgcttgtaagagacggccctgattgctctcagctttccaacctgggcagccctgctagtgaaagtattacttccttggtcatcaactgtcaagtctgagtaacaacctttaagaaccaaactgaatgtgtgggttgtttacctctccctcatactcgaaggtatcccttgcacaccttcaaaacctcttagaccaaaagccttatggctctagtttgcctggaaggaagttgtattgtctatagagtatgtgtgccagtttctgcaataaaatgttcaaatgttctctctctctgaaactttgttcattgtatctggtggaattttggttctcagggagtagacacctggcccttgcttctaatgtgaagtgtctaccagcccagtggtctctattccagatttgaacttactttgacccccgccttattatgtcttagaatttaatcatatcattattattatttttgagatacagtttcactctgtcactcgggctggagtgcagtggcgcgatcttgactcactgagacctccgcctcccgggttcaagcaattctcatgcttcagcctcccgagtagctgggattataggcgtgggccaccacgcctggcaaatttttgtattattaggagagataaggtttcaccacgttgaccaggctggtcttgaactcctgacctcaggtgatccgcctgcctcggcctcgaaaagtgctaggattacaggcgtgaaccaccacgcctggccaccatttaatcatattatgattgaacattttcgtttccacagttttgtatttcttatgttattattccttagttcctatctgtaagatcataaagtcctttgaaccaaacacagttaatattttatacatatgttaaaaactgagggctgggtgtggtggctcacgcctgtaatccaagcactttgggaggccgaggcaggtggatcatgaggtcaggagatcgagaccatcctagctaacactgtgaaaccccatctctactaaaaatacaaaaaattagccaggcgtggtggcaggcacctgtagtcccagctgaggcaggcaggagaatggcgtgaacccaggaggcagagcttgcagtgagccgagatcgcgccactgcactccagccccagcccgggtgacagagtgagactccgtctcaaaacaaacaaacaaaaaacaaaacaaaacaaaacaaaaaaactgaggtgtgagcccggacatggggactcacacctgtaatctcagcactttgggaggccaaggcaggaggatcacttgaagccaggagtttgagaccagcctgggcaacaaagcgagaccatgtcttaaaaaaaaaaaattacccaggcacagtggtgtgtacctgtagtcccagctactctggaggctcaggcaggaggatcacttgagcccaggaattccaggcagcagtgagctatgatagtgccactgaactctagcctgggtaacagagtgagcccctataaaaagaaggaaggaaggaagggaaggaaggaaggaaggaaggaaggaaggaaggaaggaaggaaggaaaacaagtgtgagatgaggagatgaggaaactttcagaaaaatgctcttattttctgcttttagaaaccaaaagatgaaatggtaaggcatcaggtgggaatcaaagtaagttcaaagatggaatagagaccactgggctagtagacacttcacattagaaggttgcagtgagcctagcccgcgccactgcactccagccttgggtgacagagcgagactctgtctcaaaaaaaaaaaaaaaaaagaatgtctcatcatggggtactaccattatacgcaggattttttttttttagatggagtttcactcttgttgcccaggctggagtgcaatggtgcgatctcggctcactgcaacctcagcctcccaggatcaagcgattctcctacctcagcctccccagtagctggaattacaggcacacaccaccacacccggctaattttttgcatttttagtagagacggggtttctccatgttggtcaggctagtctcgaactcccgacctcaggtgatctgcctgcctcggccacccaaagtgctgggattataggcatgagccaccgcgcccggcctgtgcaggaagttttagaacgaaaaagattctgaattgatccttgctaactttatttcagaaagtggtaaaatagctgtgaagtacagacccagtgaagagattgtaggtgtcagatgtaaagaagaactacacggtttaattcaagtatgtggagataaaaactcactggtaacataaccagcgtaaacataattcaaaacaagcagcagaatttggaggataatttgtttcattctcaggaaaatgtgaaactctgaaactgcttttgagtgcagggtatttctggggcttttcctgaagtcttgacccatgtctctgaccccttatttgaagtttggagagcagaactgaggacggttagagtattactacagttgtggacacaggaaaggggttagtctccccccaccacccaggagtaaagggtgctgggctgcttgaacacagaccttttagaattcccttcaaacaggatcccaaatctttcctcgctaaggggaggggaggggtgttcggaggtggggtgggacaggaagtggggtttggatgggattgtgggataagatcgcggagcggatctggacccgagcctaataaaggcggtgtaaatacaggtgtcataaaggacggggcggggcgcgcggttgtcaggggcgcaagcgtctcggggctgccagaatggctccggctcagggcgcggcgccagcgcctgtcatgtcccagctgcgcctctgggtcccacggcacctcctcaggttggcaactactgtggctactagtccaggaggctcagcctctggagtgggtccaggaccggctccagccgacttccgaccctctggggccgactgagccctggttttcctgctcccccagtctcccacccgaatctccctttgcgcttacccccgacccccgcccccaccggcagaccccggggactttgattacctggggtcctctgcttcctcccagatgtcagctccgcctcaggaatcgactgagactttgaccgagactttggttccattcctggacacagattcagctggagagctggccccggggccagagcagttagcggctgcacaccaggacctgaatgacaagctgacttggcaagaaaggctcccagagggggtctcagtgctggactgggatcagaaacagacctttgctcggcctcctcgcctcaaaagtaaggttcatactgcagatctagatcaggctgcagatcatcaggcaaattaaatactttacttgttccacctctagatagtcagaattcaggccgggcgcggtggctcacataatcccagtactttgggaggctgaggcgggcggatcacgaggtcaggagataagagaccatcctggataacacggtgaaactccgtctctactaaaaatacaaaaaattagcaggacttggtggcacgcgcctgcagttactcgggaggctgaggcaggagaatcgcttgaacccgggaggtggaggttgcagtgagccgagatcgtgccactgcactccagcctgggtgacaaagcgagattccatctcaaaaaaaaaaaaataaataaataaatataaaataaattaaaaaacaaaataaaataaataagatagaattcaaaagcaaccaagtttactgtttcgcccaagaacctgaacaaagatctagctaagtatctgaagcttgctaaggttgttgtgtggaactccacacctatttgtatcaaaacctcagtgtcagaaacaaactttgcaggatgagtatttagattcaagtatggatacagtgtatcgcagcagcctgcctccagaactccagatgaactcagatgagcctccagggccccctgagagagttggactttctcaattccatgtagagcctgaaactcaaaatccagagacccttgaagagatctagtcctcttcattccaggaagaagccccagagcagcttccacagctcactgaagaggcagaaccttcttcaacccagcaggaggccccagctctgccttgagggggtccactcttcttcaacagagcaggaggccccagcacagcaactacctgcctctgaagagattgtagctctgccattgatacatcatgaggtaaatgttccattgaaaagttggagtgaagctcagcactcacacttgcgcagtgtcacagtcaaacctgtggatgtggagcttgcgctaactccagagccagaaggaacttatgtcaagccaggaacaggcctctgctcagcctccagagcgcgccaaagaggtgggctcttcctcaacccaattagaggccccagctcagacaccagagcgccctgaggagacgaaaccctctgcaaccagcaagggaccccagctgagcctccaggtcctcttgtggaggctgaactttcccccagtgagcaggagcagccagctcagccttctgagtttcctgtggggggtgggggggttgaaccttctgagacccagcagaaggccccagctcagcctccagagtcctctacagagagtgcagctcaaactccatcaaagcatgaggtgacagttcaccctccaggtgaggatcaagctcattataacttgcccagcattacagcgttacagtgaaacctgcggatgtggagattaccataatttcagaacctaccaaggaggcagaatcttctccatcccagcaggagatcccaacccagcctccagaggaggtggaagcttctgcaacccaggaggaggccccagctgagcctccaggtcctcctatggagtgtgcaccttcccccagtgagcaggagcagccagctcagccttctgtgtttcctgggaggttgaacattctgaggcccagcaagaggctccaactcaacttccagagtcttctatggagagtggagctcaaactccactgaatcatgaggtgaccattcaccctccaggtgaggatgaagttccttttgacttgtccaacgttacagttaaacctgtggatgtggaggttaccataacttcagagcctaccaaggagactgaatcttccaaagcccagcaggaggccccagctcagcctccagaggagtggaaccttctgcgagccaggaggaggccccgactgagcctccaggtcctcctgtggaacctgaacgttcccccggtgagcaggagcagccagctcagccttctatttcttctgggaaggctgaatcttctccagcccagcagaaggccccagctcagcctccagaacatcatgaagtgacagtttcacctccaggtcactgtcaagctcagcattcagatttgcccaatgtcactattaggcctccagacatgcagctcactatagcaacagagcctactgcagaggtgggaagttctccaatccaccaggaggctacagctcaggtctcagggccaggaagtgatgtagaaccttctgccacccagcatggtggtgcacctctgcgtccagagtcatcagaagatgctggacctttagcaggtcaacaggagacttcagttcaatctccagaacctgttaataatgagaacccctctccaacccagcaggaagctgcagctgagcatccacagacccctgaggaggctgagtcttctccagcccagcaagaggcccaacctcagactccagatccccctaaggaggtagaaccttctccagtccagcaagagttcccagctgagccaccagagccccctaaggaggttgaaccatctgcaacccagcagcaagcctcaggtcagcctccaaagtccactgaagaggtcagtcctccaccacagcaggagataccagctcagccatcagagccacctgagaaggtcaaaccatctccagtcctacagcagaccccaactcagcttttagagccacctaaagaggtagaatcctctccagttcagcaggcaggccctgctcagtcctcagaggcccctgtggtcatagaaccctctcggacccagcagatggccccatcttcacctccagagctccctcaggaagtggaaccatctcttaactcagcagggggttccagctcagactccagagccccctatggaggcagaaccttctccaatccagcaggaggccacagttcagactccagagccccctatggaggtagaaccttcaagccagcagctggtcccagctcagcatccagagtcacctaaggaggttgcagctcaacctccagtgcatgagatgacaattccaatagcaggccaggaccaagcccagattccagtatcacccagtgtcacatttcaacctttagacctgggacttaccgtcactccaaaatccactatggaggctgagtattctacaaccccaaggaagactacagctcctccaaaacaccctgaggtgatgcttccacctcctgaccaggttcaggctcagcacacaaacctaacaggtcatagttcaacctttgcacctggaacttaccacaactccgcaaccatgtttttttcctccaaccatgaagaactcaactcagcttccagagacacctacagaggttgcagctcaacctccagctcattatgaggtgacaattccaacaccaggtcaggatcaagctcagcattcaacactgtccagtgtcacagttcagcctttgggcctggggcttaccatcactccagaatccatgacagaggttgaactttctccaaccattcaggagaccccaacttagcctcctaaggaagttgtaccccaacctccagcatatcaaggggtaacagttccaacaccaggtcaggatcaagctcagcatccaatgtcacccagcgttacagctcaacctttggacctgggacttaccatcactccagaacccactacagaggttgaacattctacacccctgaagaagattcctcccaagcaccctaaagtgacacttccacatccagaccaggttcagactctccattcgaacctgactcaagtcacagttcaacctttggatctggaacttaccttaactccagaatccactatggaggttgaaccttttccaaccatgcagaagaccccaactcagcctccagagctacgtaaggaggttgtagctcaacctcctgtgtattatgagacgtccatgccaacacgaggccaggatcaagctcagcatccaacatcacccagagtcacagttcaacctttggatctggggcttaccatcactccagaatccattacaaaggttgaaccgtctacagccctgatgactacagctcctcctccagagcaccttgaggtgacacttccaccgccagacaagggtcaggctcagcattcaaacctgactcaagtcacagttcaacctctggacctggagcttaccataactatagaacctactatagatgttaaaccgtctccaaccacggaggagacctcaactcagtctccagacctggggcttgccatcactccagaacccactacagagattggatattctacagccctggagaagactatagctccacgtccagaccaggttcagactcagcatcgaaacctgactgaagtcacaggtccacctactgaactagaacctactcaggattcactggtgcagtctgaaaattacgcccaaaataaggctttaactgcaccagaggaacagaaggcctccacaagcaccaacatatgtgatctctgtacctgcggagatgagacgctgtcgtgtatcgatctcagcccaaagcagaggctccgctgagtgcctgtgccagagcccaacacctacaatggcaccttcaccatcttgtaagaatcacctttcctccattgtcttctgtgtcctgcctcacatggcagccttttcctggaggccttcctgggccttctttatctccccaagctatactgacaactaactttctgctttcacctctgccggtaatctcttctttctcgtcgttctcctttactattaggccccttctccagtcttttacttgtgattgctcttacttgtttacttgtccattttcatttagccccatcgcatcattgcttaaccgctgctctcctcccattttcgcttcaccctcttcacagcagcctgtccctctccccatctcagtgatgatgctctaaatggttaagagttgattctagagccaggctgcctgggtttgaacccagggctgtcatttattagcttgatgaccctgagcaagttattctgctctgtgacttaatttcctcatctttaaactggggattatgctagttaccatttcataggattgttgtgaaatttaggtgagtgaatatatgaaacacttcatcagtgcctagcatatgcaggagggttggctgtgaacatgattactcagtctttgagttatgtccagaactcatctttgtccctggctttctatatgtagcactcattttgtgtccaacccagagccaagtatgctactgtccctagaacacgaaaatggtaggagggaagaaagagaataggcataaaaagggaggtatatataattaagtactaaaagataatgcagaccatcggtgctagaattcaccaaaatctgtgatcttgagatttggaggtcagagaaagctacatggataagctaaaactttacgtgggggttaaaaagtagctataatttgttaaataggggaaaaaatgggagtacaatctaggcaaaggcatggctacagatatgatgagaatttagtagaccaatctggctgcaaagaatcaggcgagggagcgatgaagaaatgattatgtaaaaccttgattatcaggtatgggagtttaaaagttacacagtgagatatgggaagccattgaaagtttccaaccaagagagattaaatgattaaaacagggaggattattttattttttgcataatgttcaagtgtagacatgcaaaggattattttagaatccatatgtagaatgccctagaggggaaagcttaattcagggagacaaaatagaaaggtctagcaaaatctaggagtaaagtgtgaaggggctaaatcagattggttgtgataggagtgaaaagaaaaaagcctaggatgtttcaactgagggcactgggccaaagctttggtgttatccggcatagggtttctttcttcttatttgttgataataataagcttttgcccatttttctgttgaggtatttaccatttttgatttgtagaaggagttagtttagacacataagtgattttggataaagtccttacattcaaagtaattaaccggcattatctgtctaagagatgggatggataggaagttaagcttccgggagatgcctcatttgtgccagtggtcccacattatttcttgattaattgtgcaaactgggaagctgatagctctggaaatgagaaagcaggtgttattctctgtttctgaatatcccccacaaggttgccatgattcttttacttatcctgttcattcttttcctacctattcaaggatatgaactgtgtttcttcacagaaatttccaaggaaactatatttcttacattggtgaagatgtatggaaagcatacagttggactgagaaactgtgagtatattctctccaaatatgacaaaaaactaactgcattgtaagatccttcttggtacagaattttgaggtcggtacctctgagaaaacatgtttcccttccataccccaaatgaacctctgttgattgcaatcgtgtggtaattttaaaattaaatttggtaggctctctttaaaataagagtcaatttaaatttatttttattatgcaaataatacatgggtatttttttttctttttcttttttctttttttttttttcggagacaggatcttactctgttccccaggctggaatgcagtggtgcaatcactactcactgcagcctccacctcccaggctcaagtgatcctcccatctcagcctcccaagtagctggaaccacaggtgcatgccaccactcccacctaattttttattttttgtagagacagggtctccctatgttgcttaggctggtctcaaactcctgggctcaagtgatcctcccaccttggtctcccaaagtgctgggattacaggcatgaaccaccactcccagcccatgattatattcttaatgtataaaaatgaaataacagctataacaaaaatcttccttgtgtcctactccctcatccctgaggtaacactctgtgtttagtatataaccttccagactttttcccatttgcctacatacatatttacataaagcaaaatagatttgttgtgtggttttaaaaatcttttttctttacataaatggtaacatcttgcaacttgattctttcacttcatgatgtgtcttagatttccttccttcccagtacttagagggttaccccattcatttaaactcctgcataatattccatagtatggatgtatcatagtttatttaatagttcccccattgatggatgtttagattatgtctagttttcttgttacatgcattgctgcaatgaaatccatgcttctttgtgaacatgggcaagtatttctgtagaatagatatctagaaatggaattgttggagtgaagcctatgtagatatgaaattttaattgccgtcaaaaatgttgtgcctacttacactatcgtcagcagagtatgacagcattcatttccccacaccttttcaccactggctattctccaactttttgttgatgttatggatgaataaaaggtatcccatctaaatttgaatttttctgattacttatgaatttaatgaaatgtttttatgtgtttattgaacatttgtgtttcttctctgagttttctgtcctttgttcatgatctcgttgaatttttaaaatcattttcacattgatttatagaaggaattcgacacataaatgattttggaaaaaatgctcacattcaaagtaactggcttttttttttttttttttttttaattgagacagagtctcgctctgccgcccaggctggagtgcaatggcgccatcttggctcactgcaactgccactgcccgggttcaagcgattctcatgcctcagcctcccgggtagctgggactacaggtgcgcaccaccatgccccgctaatttttttgtatttttagagatggggtttcgccttgttggccgggctggtcttgaactcctgacctgaggtgatccgcccacctcggcctcccaaagtgctgggattatagacgttagccgccacccccgggcagtaactggcattttttacaacagtttgtgtgtcacattattagttcaacttacatagacaagttatacacgagctctaaattaaaaataaaacacatgacaatcatagtcatctaagaagaggaattatgaccactttaaagtagtttccctcacccttagtgtgatatcttattggtaagaaaaaaaaatgctagaaccagacaatcctgttttctagctctagaggagagatgggattctgcggcttgtgttccagatggagtctcctgataacaagaaggtgtgggagatggctagtaagggagtgtacacccttcctccagggctccaggaccctgccccctttctaacaccaattgttcctgcctggaggaagacactctttgctgcctggcccaaggaagaaagatatgtggttgatgtgcctctggcttctcccactccactgtcccaaccaataacttgtaggtagttcctgggcatttctgacaggggatcatttgtagagatgcttccacattttgagctaagtttgtggatttttaaattatttctgttctatgatttttagagatttgctagaggttggatgggtagagacttggcatgttttcaatctgccacttgaaataccacttcttaggaaaacaattttgtgcccttattatatcctagagaaactcaggcaaaagtactatcaggatacaagtataagaatgttcaaagcagcattctttgtaataactaaaaactagaaatatctcagtatccatacccagtagatgaatcaatatattgcagtagaatcatataatggaatactctattattctattatataataatagaagtatgttaatactttatatagtaatagaagtattattaatacttattaaaagtattatgtgtgtgtaatactgaatggaaggattattaatacttctattattcattagaaacataatgcaagccacatacataatattaacttttctggtagtcacttaaaaaataaaactaaaaaagaaacaggtgaaacatgttaatatattatatccaaaatattttcatttcaacatgcagtcattatatatgttattaatgagatattctattttcatactaagtcttcaaaatatccaaaggggtatcatttctacatgttgttagtataaaaattaattggggagtttacattcttttttccatactaagtcttcgaagtcttaatttggttgctaaatttttataaaaaaaaaaaccttaatctgttctgctcagcagtctagggagacaagtaaataataataataaaaatacttaacctggctggatgttaggtagctcatgcctgtaatcccagcattttgggaggcataggcaggaggatcacttgaacccagtggttcaagactagcctggcaacacaatgaaaccacatctctacaaaaaattaaaaatattagccaggcatgatggtgtgtgcttatagtcccagctactagggaggcagaggtgggaggatcacttgagcctgggaggtcgaggctgcagtacgcagtgattgtgctactgctctctagcctgggcaacagagtgaaaccttgtctcaaaacaaacaaacaaacaaaacaccttagtctatatttagattttgtaaaatttgcagttgaaaaagtagcatcatatacccaagttgttgcaaacataaattttctaatgactacattgagtatcagcttttaaatttaaaaataattaaaatgaatatattaaagattcagttcctcagtcacactagtcactaacagtagccaaatatagctagtgactaccttattggaagcacaacacaggccttgaaatgaatcaatctcagcaacatacatcttaaatgtccaaacagattattgagtgaaagaagtgatacagaaaataatatgtgtaatatgatttcatttatataatgttcaagtaggcaaaactaaaatatgttgtttatgactgacatataataggtaaaacgacattttattttattttattttattttattttattttattttatttatttttgagacagggtctgcagtggtgcaaatgcagctcactgcagcctggaccttccatgctcaagcgatcctcccatctgagcctctccagtagctaggactacaggtgtgcaccaacatgcccagctaattttaaaatttgtctagagatgaggtcctgctgtattgctcagactggtctcgaacttctgggctcaagcaatcctcctaccttggcttcccaaagtgctgtgattacaagtgtgagccactgtgcccagccagaactacattttactttactattttattttattttattttattttattttattttattttattttattttattttttgagatgcagttttgttcttgtcgcccagcctggaggacagtggcgtaaactcggctcacagtaatcgctgcctcctgggttcaagcaattctcccatctcagcctcccaagtagctggaattataggcgcccaccaccatgcccagccaatttttgtatttttagtagagatggggtttcaccatgttggccagactggtcttgaactcctgacctcaggtgattcacccgccttggcctcccaaagtgctgggattacaggcgtgagccactgtgtcaggccagagctacattttaaaaacaagaaaattattacgaaagtcaggatagtggatatctataagggttagagagggggttgtgattggaaaggggcacacctggggcttctgggatgctagtaatgatctttcgtaatgatattatatgggtatctgctttataattattaaactgaatatttggccagatgcagtggctcacatctgtaattgcaacactttgggaggctgagacagggggatcacttgagcccaggagtttgagactagtctggacaacagagtgagaccctgtctcagaaataataaaataaaataaaaacaacatttatgttatgtgcactttatgcacattgtagttctcaaatatttttaatgggagaaaaaagtcaaatggcttcacttgcagccctgacatagttccatgtggggcttttataacaaggtttgggaaaagagaggaggaaatggaagttctgctgatcttggtgccacccagagttggattctaacagggactttgtgatctagagaggaggcattaaatatacaatttggtgggaagagtgggtaggggtgtgcttgtgtgtgtgtgtgtgtgtgtgtgtgtgtgtgtgtgtgtgtgtatgtggtggtggtggtggtggtggtggagacagatggacacaaaaaggaaaatgtaagaaaagcttttaatgaaagcagagcagataccaccatcttgaaattatcatgacccagatttcctccacatgtaggagttagtcctgtgtagcaaatagttgtagtttgcattttgatctagaaaataactttttcattttccagaattctcaatgaaaattatttgactaaattacatagggattcatttgaagggcctgctatccctccagtatttgtaagttagttagttaatcatatttattagtttttagtcatattatctgtaaaatgaatataggggttcaaattagataatctctaagatttctttcagcaatacaattctgcaattctgtaagtttgtatagggtctcagcccatctctagcattaataccttctatgcattttcaattttttaattatatagacagaatacagacagaaaagaatttcacatggtaataagatctgagcagtgattgacacccatatgaaccttgttttataaaaagtgttcacatctcatcttcctatattcagtctacaaccaatagatcaaatctaatctacagtctgtttttaaatagcccattaagttaagaatggtttttacacttttaaaggactgggaaagaaaaagaaaagaaacaaagagaaatatgcaacaaagaccacatgcggcccacaaagcctaaaatatttaccaactgaccttcccaaaaaagatttgggtccgggcacggtggctcacgcctgtaatttcagcactttgggaggtcgaggtgggaggatcacctgaggtcaggagtttgagaccagcctggccaacatggtgaaaccctgtctctactaaaaatacaaaaattagccaggcatggtggcagacgcctgtaatcccagctactcgggaggctgaggcaggagaatctcttgaacccgggaggcggaggttgcaggatcatgccactgcactccagcctaggcgacagagcaagactctgtcaaaaaaaaaagagaaaagaaagatttgaaaaagttgctttagtagaatgaaaggaattaaagttaacttcagattgttgcctaaaggagaagaaaatatagactacctacattaatttgaatatcattaatccagaattttttgataatttaatctaaattaaattaacatttatatattaaataataagcagctgaattatataaataatattatcaagaatattaagctaccaaaagaatagcctggtattaaggatttcatttcaggaattgttatattaaaacagatgtttaaaatgatggttaagtggtatagctagagtgtttatagtaagtaagcatatcagaaatgcccctaactcttcactaattacaaaataactatgtcctcagccctgttaccaaggaagggatacctgcatagtatttctgtctgtttagagataagaagatactatgttcattgctatgaaagctggatttttatcctttgcccatggtttagaggtgtgtatgtcattaatcctcattaagctcattagtgatgcttttttgcagacagattctttcaaatgtagaaggcttaaggaaagtgggtgtaaagaccctcaggtggatgccaaagcgctacagaggccatgaagtaataaaactatatttcctttaaaatagtcattttccttctactcactgccccagctattcatttattttataaatatgtgagttcattttatttccatgtgtcagttttaaacatggtgggcaacgcagatgagcaagagctagtccatgctttcaaggagtttatgctcagaagaaatgggatgaaaaataagtacattcaaaagaagaaatggatgtgggcactaggagggatacattgtttctggagcatagaagagaggagattgacttcaatttggacccatgaagatgttactagaacaatgccatttgaataggactttgaagggctgctgcgtcacatcagacaaacatgttggggaaaagattctaaacttgcaaaaggaaaatgggagaggggcaaatcacaggaaagtatttgaggaataccatgagtacctgtagagtacaaggagggagagtaggaaattggagccagatcttctagggctttgaatgtcaagctaaggggccatcatacggaccagtgttatcacagcagtgctgtgagatagagctgcatcacaatcactgggaggtcgcgttagaactcagttctgcactctaccctcgcagttactgattcagttggtctagagtgggaccaaaaatttgcatcttcagtaatttcctaggagatgctgatctttgcaagccacttctggagagtttatctgatgactgtgtgcaggatggtttaggaagggagagactagagatggagacatcagccagacaacgttacaccatccaggtaaagagggagggacaagctgacaagctggaatcaatggaagtaagagttaactggagtcaagaatgggtgttgactacaaccgtttttatttgaaaaataaaaatctagttccatgttgttttgttgccccatcactgtataagtgaagaaattgctttcatggaatattaaagcaatatgaaaccaaaaaagaatttatattaatatgacagaaattaattatattaatatgatttgaattagttcaaagttatgtattagttaaaggggtaacttcctttcagatgatgtgaaaggatgtcttttatttcttctgatattgaactggcttaggaaaacagacctaaactaggaaggtgagactattccttttaatatcagaaactatatataaggataaaaactttgagcttacaatctaggatttgatgagactacaaaaggtcatctaatcaagtctactgctctcaggaaaaattaattccaaagtctatcaagatctatagttgtatattttatttattaaaactatgaaggtgagactctaggagaggtactggcagggttagggactctgggaagttcaaatacaagtctaaagatttagagtttagacgaaaaccatgtattcaatgttactctaaacccttcctatttattcctactaatttgacatctaataactaatcaaggcaatattttccttttacttttcctagagatttatcctgcaataaaatacagcctattgaaagacatacatttgaaccactaccatttttgcagttgatgtaaattacaaatataactcgattacatttagaactttaataaaacttaatgataaacctctttgctattcattttgaaatatgattaaaattttaaaagtagaaagttactaaaattatacagcaaatcctctttgtctctaggaaagattagtgtaagaattactacagagatcatagtgaatcatcagagagcagtggttctcaaccagtgtgattttgcacccaggtgacacttggcaatgtctgtagacagttttggttgtcacaactgtggtgtcctcctggcatctggtgggcagaggccaggaatgctgctaaatatcctacgaggtacaggacaaacccccacggcaaagaattatatagtccaaaatgtcgatggccctgaagttgtgaaatcctgtcctacagaaataaagatcacttaacataagtatttactgagcattcactcttttgtatctaatgcaccacatgtgcaatgttaaagtataaatcataagccagtatcttccacagtgagatttctttagtgcataaagtattgaggttatgttccatcctatataaattagaatcaatgcaagtgatacatgttctgaaagaacatacatatttttcttctttggcttgtgtcttttttggtaggaatcttggttgcaatttactgacagaactgagctttggaacctttcaggcctggcacggaatgcagtttttacacaagttgtaagtgaaatagaagatgaatacatgtaaacaactatttacatgtaagaacctcatacaattattggttagctgggtataagcccattatggattctgaaaagcatgtcttaaatccattcgttttttcaaatggggaaactaaagtacgaagaggccaagaaacttatatagtttatatatgacctgccctgcttttcctagttctgacctttggcatgggcaagaaaaggcatgaaacaagtgaccctattggcacaatggtctcaacacagcaaatgtatgttgggggctgggctcctttgttttgggtcgaatctttctagtaaacagaactaatttgcttcaggaaacatttgctgcagtgagatatatgcccattgcatttctttccaaaggcaagttgccaagcgaagctgccagtaattttgtgaccgatatgacactattctgtggtgtttgtaagttgaaacagtatattttattgcattacaaaagtttgttaaaaaaaaaaagggggggccccagctgtggtggaatgatgatgaattgaatagagcctcagcatcagggcttctcacttgcacggtcctgggaggcccttgggaatcgttgtattcatacttttccatgtttttattattaataggtaaggttcaggccccataaaatcctgaaatcaccctgggttccaataattacaattttgaatgaagcctctatgttattgacaaatactgatcagccgagttagcggtgtggtagggtcagtctattttgaatttgaaacccatcccaaggatatagcaagagcttattagcggacttaactggggtccactggcccagcacagtaaagccaaaccattctgaggttttgcagtgggagaaaggagcacattggtttgcagggcgccaagcaaggaggaccaggcagttaacaatcaaagtccccctctgaatggtagcaataatcatatctcttacagatgaaatcaggaatgaaatggtctatggaaaaccagcagtggttgataatactaaatgttaagtatgtacatattttttccctgactttaaagtgcttctccttcatttacctacacaggtccggattgatggcttattttaaaaaattttcttactcacttcattggttctaataatacaagctccataattttggaaactgaatgactctgcaatgtagaaaggctataccttggcccggcgcggtggctcacgcctgtaatcccagcactttgagaggccgaggcgggcggatcacaggatgcccgggcatttgtagagaacactgccaaagaaaaaaaggctcaggagtccagccccaagggagctggaacagcctcacatggtgcaggggccaagaagttagccaagaactacttcatttcccaccccccatcaaatgatgccaaggagactaactccgaagaggactgatgtaaaatgcttctgcccagcatgggtgttcactgcacgagagcacttggccaagggggtgagtggggctgaaaatcctgctcaggctccatgctgagccacatacaaagtctccccgagacattgtggggcccttctggacagacatggagagcttctgaaagtcccgcatgcttggaattattttcaagaccccaggtatgtggtctgcagtggttctaatcactgttactatggactgaggtactcatttagtcctaataagaccagagaagtacattgtgagaggcgtgggaacggcagcatcactcactgtcttgtccacgtgtctccccggaggcattttcagatttctgccacataggagatgctcatggcgaactgaaactcaggtacattggaggattcattgctgtggccagagaaagcagaggacatgcaaaatgcatatttccctatcctccaggatggctttgtctagttaagacagccactctggcttaggggtatgtacagacctcccagtgctgcacgcgtgaaaaacatggcacagaaacctcacggcaaggagtcttccaacaaggatgacatctttcacaaggacgtggagtaaacgacagagccttcgtggttcccatctaaaatgaagagggagtgaaaagttgaattgctcctttcaagaatcaacaagcttggcattttaattcctatcccaggggcagtgaagccccaacagagaaaactcaaaccagaaagtcgtctggctgctgagcgggaggagtgtgaggtcccctgggaggacctcaggcctcaggcctctgcaaacttgggaaactgctgctgaggtccttccagctccatggtccccaggctggtgactgatgggggaatatggagtccagctgactaccagagcctgcatgtctgctgctagccgggaggaaaggatgacttctacctcctttccatattccaaattttacatgactgcatttttttggcagcaccctgctggcaaaggagacttgacgtgtggttcctgggcttctgtcacctgcacagacaggggtgaaatgagtgtcacaagcagccaccactctgcagcatacctccacatctaggcgtggtggggagccccacttatacttggaggtgtcctggcaccctacccactttttggtaggtgtttgggtgtccaaggctttgcagaagaagcaggcagggagtctatggtggagtaacgtggtggagaggcctggagaggtgtcattctagctgggcagcgggtgacacgcagtcatcccctcagtgaacgctggacgtgctctgtggctccctgcaggcctgcggatccaccagggggctccgttccttctgggccaaagctgaagaagcggctgctgcaccagagaagtgcatctggatgaaggtggaagcacacgcgggcccgcagaaccgcctaagatatcttcaggtgtgggcttggaactggtaggctttcatttctgcttcattccatggccaaagcaagccacatgggcaagtctgaagccggggcaagaaagtatcctccacccacaacgaaaccatggcaagcggtaggtactaagagggctgaggaattgaggccaatagttctatctatccaagtgagtgaggagctctgctttggggattgcacaacctgggtctgctcttgctgtggtgtctgtcactatgaacatgacaacatggatcgccatcaggtcagggaccctgacaaggcaagaatcatgtcctcctctgcacacaaccccactcccttccccaccatgcctaacaccaagcctggccctcagggatgactcaggagagcattttaggccattccttcattatccccatgtgacttgttgataaagataagtgcctcttcaagttcacctttttgaataaaagggatttatttaaatatttcttttaaatctccacagcttttcatatctcacactaacagatcttttattctactaataattctttgttaagcccaagtagttgttaaatggagtaaaagagtgagtatattctgtgttcttatattgtaaccaaggcctatctcattttttccctaagtctgtccagacatgcctgaacatgcccaggcatgtcccagcttgcagcctatgccccttccttatttggaaatgttattgccttcctagtttcctgtaaaaagtcccctcccttcctttgtttcccattgcacctttacctatttaggaaaatttcaaggttttagccagtcgggatcagtttagattgtgaggtgcagctccaaccagtggaggtaggacacagcagtagaagcccagtgcgtcagggataagaactcctgcctttctttgttcagtgtgctctcgtggcagtccagcttccaagaagcaccctttctgcagaaagtaaatttgccttgctgagaaaattatttaagtgctggttcttctttgcagcactgaggaacaagcatttgtttgcaacacttgttatgaaatatagactgggctgggcgtggtggctcacacctgtaatcccagtgctttgggaggctgaggcaggtgtatcacctgaggtcaggagttcaagaccagcctgggcaacatggtgaaaccccatctctacttaaaatacaaaaattagctaggcatggtggcatgtgcctgtaatcccagctactcgggaggctgaggcaggagaattgcttgagcccaggaggtggaggttgcagtgagctgagattgcgccattgcactccagcctaggtgacagagactctgtctcaaaaaaaaaaaaaaaaagaaagaaacatagacttatttcctaaagatcagcacatagtgctaagtatttcccctgtaagctgtaaacagactctgccatttgaaactgggatctgtccccagatgtgtcagaccaccaaatcccatgtctactgctgccctccagaagaaagggtttatacagagccaaacaccaaggcaggttagtgaaattactctaaaggccatttaaagctggaaagaggctcaccacctgaaatgccctaagaggaaggctgtctagggatccagatgggacttaaggacaatttttttttgacacagtctcattctgtcttccaggctggaatgcagtggtgcacttggctcactgcaagcctcaagctcctgggctcaggtgatcctctcacctcagcctcccaagtagctgggactacaagcatgtgccaccatgcccaattaattttttttaagattttttttgtagagacggggtctccttgtgttgctcagtctagtcttaaactcctggactcaagcagtcctcctgcctctgcccctcaaagtgctaggattacaggcatgagccaaagcacctgtcctcttaaggacaattttaagaatagtgaggctcaccgtcagagcccctgctgctctacaaagccccttggcccctctcatcaggataaaagcaagagcagccccagatgttttgtcttaatggccatctttctcaggagactttgctctttaaaggagaaccacttagaactatgattaactctaaagaatgccaccagcactactgaatgccaggcatgggcctcatgggtgaagagtatattttagagcagtgattcatggtaaattatctcccccagcccctaaaattgactattcaatgtcaaactatctcaggctcaggccgacaaaagtggaggtgtgacgaacctagggttgtttcgaagtgtcttggttacggtatatgtggaagattttagagcttgttgtaaaaacatgatgacccattgctctccaggctgggtgagggattgcctttgtagattacaagaggatattatgcagcagtttttaaaaatgaggcagactaggccaggtgaggtggctcacgcttgtaatcccagcactttgggaggccaaggtggacagatcacctgaggttgggagttcgagaccagcctgaccaacatggagaaaccctgtctttgctaaaaatacaaaaattagttgggtatagtggcaggcacctgtaatcccagctacttgggaggctgaggtaggagaattgcttgaacccgggaggcggaagttgcagtgagccgagatagcgccactgcactccagcctaggcaacaagagcaaaactccatctcaaaaaaaaataaaggtggggggcagactggggcaatctgtctccagaatacataggtgctgttaagggagtaaagcaagatgtaggagggcgtgtatagtatgctactgtgtgctgtgcattagctgtacagaattgtgtggtccgatacagtagccactagccacatatggctacttatgtataaatttaggccaggcagggtggcttatgcctgtaatcccagcactttgggaggccaaggtgggaggataacttgaggccacagcctgggcaacatagtgaaaccatttttctacaaaaaaatttaaaaatgtaataattggccaggcacagtggcttgtgcctgtaatcccagtactttgggaggccgaggcaggtggatcacctgaggtcaggagtttgagactagcctgccaacatatagtgaaaccctgtctctactaaaaaatacaaaaattagccaggcatggtgatgcacgcctgtagtctcagctacttgggaagctgaggtagaatcgcctgaacctgagaggcagagtttgcagtgagctgagatagtgctgctgcactccagcctgagtgacagagcaagactctgtctctcaaaaaaaaaaaaaaaaaaagtaaccaaacatgatggtgtgcatctgtagtcccagcaactcaggaagctgaggtgtgagactagcttgagcccaggaggtcaaggtggcagtgagctatgattgcactattgcactccagcctgggcaacagagtaaggccctgtcccaaaaaataaatttaaatttaaattaatacaaattaaatacagtttaaaagtcagctccagttggatgtggtagctcacacctatgatcccagccctttgggaggccaaggtaggaggatcgcttgaggccaggagtttgagaccagccttgctgacattgcaaaaccccatctctactaaaaatacaaaaaattagccaggcgtggtggcgggcgcctgtaatcccagctacttgggaggctgaggcaggagaatctcttgaacctgggaagcagaggtttcagtgaggcgagatgtgccgttacactccagcctgggcaacaagagcaaaagtccgtctaaaaaataaaaataaataattttaaaggaatatttgtcagaggatcagaatagaatgtactttatttaacagccttttagtttaatttataatttgcaaatattgagacagatggcctgtggcatccatctgtcctcttgccctgagctgcacgtccagacttgactcataggccccagcttgggttttccagttctttgaataggtaggaatctacccagggctcatgtttttcccagctgtggggctggggtggagggtccctctggtacccctttgaatgctgcagaaaccaatttccagcatgtggtcctgggctatggaaacctctccttctgcctgggactctcactctccagagacgagttcattcaggtcatctgaggcccctgaagatttttggccacaaatggttcctcataaagtggtgcccccaggatgttcagcctccccacaacccctgcaggcttcctatcccagggtgccatgtgctactgccctgctgggaagagaagtctggaggggcacagggcagcactgccagcttagaagccccttgtcctttctttctgtcagatcctgccgccctgttccagagggaagagtggtctgtcagtaacaaaatttcttctgtcttgccccttttttgctacagttggtagaaattcgtcccagacttctttggtaactaatgatgttgggatgttgtggccttcactgggaggagacaggttgtcaggtcatccatttcacagatggttgacccgatgccaaccataacaggcaggtctcctttggctgcaagtgacagaaacccaattcaaacctgttctgtgagtagggacatttcttgaacctcagaattgaaggaaggggaagggtgtgtttgggtcccagaaagggtgaaccgtgggactagaatcccatccagcctctactccctcttcacggaggcttagcgcctcagatgggttgtgtactctggcccagcacccacaggcttcctgtgagaagctgagcagctttacttgcttccacttccaaatgtagtgactggcacacaagcattcctatgcctatggggggagtggcgggggacagggccctgggactggcagcccccgctaaagccccatgagggaaggagttcccccaaaggcagtgctgttctcagacaggaagggaagagtcagtgctctccactctgtcccgcctggccattttcctcacagatgtcacctgtccttccaggcccagctgctatttctgcctgacgtttggccaatttgcatggttaaaaccagtgtatttccaggagatggatgatgttacagaactagggttccagaaggctggggtggcccggcactcccgccttctttagaacacggagagctattagttagacagggctgaagcgtaggtggcgaggaagaggaggctcctactgcagatggccttgttctactggtcctcccagaaattcctgggccagctggaacccggggtcagagagggatgggagagaggtaggctgtgaaaggggatgcgaacacaccttctggagccactgtcttccttgaggggaccccgagagggggcttaatgggcaaggatggagcttcctgcttcccgaggctcagcgacacctatctctgagcgaccctcctgagttagtgtggggtagtcagttgttgtttgcctgaaattctaatttaacaggggatcttgtaaattttatttgctgaatctgttagctctgggggtaggaggatgagaaaagcaaaagaatggccccaagctcaggccactgtggagtgagacagaacaagagaccagagaggaaacaagcccaccagggtagccatcttgtccaagcagaaaccgcctgacacctgaaggcggtggatggaagaattcaggcctctgccccctcagcagcatacacctagtttaggggaaggacataccttccctcagtgacagaaatagccccagattttcagtctttacaatctatacatctgacaaaggactaatatccagaatctacaatgaattcaaacaaagtaagataaaaaaaaaacccatcaaaaagtgggctaaggacatgaatagacaattctcaaaagaagatagacaaatggccaacaaacatgaaaaaatgctcaacatcactaatgatcagggagatgtaaatcaaaaccacagtgtgataccaccttgctcctgtaagaatggccataataaaaaaaaatcgaaaaacagatgttggcgtggtgcggtgatcagggaacatttctacactgctagtgggaatgtaaactagtatatccactaagaaaaacagtgtggagattccttaaagaactaaaagtagaactaccgtttgatccagcaatcccactactgggtatctacccagaggaaaagaagtcattatttgaaaaagatacttgcacacacatgtttatagcagcacaattcacaattgcaaaatcatggaactaacccaaatgcccatcaatcaacgagtggataaagaaactgtggtatatgtatataatggaatactacacagccttaaaaaggaatgaattgacagcatttgcagtgacctggatgagattggagattattattctatgtgaaggccagtggaggaaaggccagagggctagcaatgaagggggttctgggcattgctctatatgggagactcagcaagaactgggtcacgtgtgtggagaagttactgagtgtgaggcaagaaccatgtcttttttctccacagggtagaatggaggttgcactattcgggccggccactctcctactggctgacaggatgctgcccgagatgaaacagggtgtgtgtgcaccacggagtcagtccaagactcctgttctcactcagggattcttcatttcttcttcctattgcctccacttcatgttattttcttcccttcccatttacaagtaaaactgaccagagccccaggaataaatggttttcttggcttcctccttgctcccatctggacccagtcccctggttcctgttggtcatttgcaaaccaagaggaccacaataaacaaatctctattttttttttaaatattaaagcattcactctgcaaagaatgtgtcaatttattcattactaattctatgtatatttgagtacataagacagtaggagtgtactaggtacgagaaggaagatagaactatttttcttgaggtgttcataatctaggtggagaagcagagacatccacaaacattacaagagattattaaatgtataataaaatccgtatttattgctttgaaacagtattggcgtccaaaaattcctccgaagaacaatttttgaagtaaaacagaaagctcagaagtaggcaatgggtgaggctaagggtctggtgttggggtggagaaagtagtgatgggatggagaaatagtagcagatgacaatgatttgggggtaatttgggagaataggctaggatctagatgatttaaaaaaaggcttctctgaacaggatctggtttgcttggagggtgctgatgtggagtagaacatgtttaaagaaaaggcaaaggcagaacagcgacagttgaaggaatatccagcataaagccaccatcagtagtgtctgaccaagctggggttttatcttggacccctcgtttctctacctctgagccttaacagcttctaccataaaaggagagatttgactattcagtggttcctagacttttgtttttcacaggtcataaagtgtaaaaaaaattaaacctgagattttaaatttttaattataatatccaagtaagagcattaaagcaactatatttatccaactatcctctatttatcagcatctttttataaagggaggtcatacttgtaggagaatggagtggaatctattttattttatgaaattattaaaaacctaattatattttccatattgtcctcattttgtagagtaggggtggaaacttcatcacagcatgggtctgaggaccattatttagaaaccacaagagacttgtcctgcagggtctcatctggctttgacattctaggattaaagtaaagagcagtaggacccactttccctcttgtgttactgaaactgcctttacaaaaattatgacaattccgacctaactgactccatcttgcttctaacctccaaactgcccttgctcattcctgggcacaggccaagctgactatgggaggaatttagtttattgtttaactttgaaacaaagatgataatcccttcctaaaacaaatcacctccttgcttgggaatcagacgtcccttgtaagactaacaaattagccacaagattagatattatagctcaggaattatgtaaccagaggccacaagatttcaaacctacccaattgctcctatagataacattgttgtaggctgggcacagtggctcatgcctgtaattccagcactttgggaggaggggggtggatcacttaaggtcaggagttcaagaccagccttgccaacatggtgaaaccctgtctctactaaaaatacaaaaattagccgggtgtggtggcaggcacctgttaccccacctacttaggaggctgacgggggagaatcgcttgaacccaggagacggaggttgcagtgagccaagattgcgccactgcctgggcaacagagggagactgtctaaaaacaaaacaaaacaaaacaaaaaaaaccccataacattgttatagtctcagcaatgcaccaagatttaacagtcgctccttgtctgagataatgcgccccagagttctttgtcctacctccaagacaattaaggagagcagacacaaaggtgaggttagagtgaaagtttaataagcgaaagaagaaagctctctgccagcagaaagggagtcccacacgggtgcccctatgaggctgatgtccagggtttttaaagactgggaaggggaaggaatgtggttagttgccccaggaccactcaggagctgaaatgatgattcctagatgctgcttagcttggcccaggaccaatcacgagctgaaatgatgattcctagatgctgcttagcttggcccaggacctatcaggagctgaagtgaaagcttggccccggacctatcaagggctgaagtgataattcacagaggccaaacttatagtccaaaaaggaaagtagagtgtccactggaacccactggagcccactgtagccacgcccacaaaaggagaagaaactttgtcctgggaggccgctgactatacaaaggacaaagacatttctatgccaggtcttgttcctttatgtgagtgagatggaagtttgttgaagtttttatccaaatggacctgaggtttttctatctgtgcagccgtgggcatgtctccaggcacaacaccctgtgcctgttcccttatgggtgcctgcagcttgaatgttttcccaggctgctttttctgttgtgtggggatgaggcactgacctgtgggccgggagctctctggggacccttcccttgttatctacctaaggcaagctaactaactcctttcaatattactattgtaaaacctaagggccgggcgcggtggctcatgcctgtaatcccagcactttgggaggccgaggcgggtggatcacaagttcaggagatcgagaccatcctggctaacacagagaaaccccgtctctactaaaaatacaaaaattagccgggcgtggtggtgtgtgcctgtagtcccagctgctggggaggctgaggcaggagaatggctgaacccgggaggcggagcttgcagtgagccaagattgcgccactgcactccagcctgggcaacagagcaacactccgtctcaaaaaaaaaaaaaaaaaaaacctaagattggcgttctaggtatttttcagaccctgtattctgatggaccagctgggaccactcagattggcaaactggctcatctggtcttgtggcccccaaccaggaattcactcagcacaagaacacaagttttgacaccctatgatttcatccttgacccaaccaatcagcatttcccactccctagcccccagcctgccaaactatccttaaaaaaccctagcttccaaattttcagggaggctgatttgagtaataataaaactccagtcttctatttagctagttctgtgcttattaaactctttctctatttcaataatgctgtctcagtaaatcggcttttctgggcagtgggtacaatgaacccatcaggtgattacactgctctaccacgtagctgattatgacacctacccctctcagacactatcagctccaatttggacctattctttgaatttttttttttttttcaaaattgatctctacttctcattcaaacctcccatctcccacatcatctgacctccacaagttcacgtacacaattccccagaatcacgtaggacaactaggaaattctttttaaggatttcatgctagactgttaatagcttagtgagttatacttttatttgaatatgttaaactccttaaaaaaaaacctcttaagtcaaaagattgcatctttcatggttatttcccacaagctcagtaggtagtgctaatacttagtaccctaatctccagcaggagtgaagatgaaactggctgctataaatatgtccctaccctttcatgctgtcaggccattttgggactgtaccctaaacatgcacttgaatggaagttctaaactcagggatcgtggcggtgtggctggaggacaggaacaggctcagaggccggccccaggtaggaggggcgagggagcgatccgggcgccgcccctcccctcgcctgcgcctctttttttaaaaaaagcgtgggcgtgccttgcgcaggcgcagtactgcgcgagccttagccgcgcaggctcagcgaagggaggctggcggatctgctaccttttgcggttcccaccaagagtgacaaaaccttgctagtgtgggagctgagctctggacccacggccgacgctttgcatgtgagcctgggccagggtggagggagggatggagaaagccgcccacctgctaactgggagttccagagtcctgcttcagcacctcacctgcctcagcctctgctgaaggactcttttttttttttttttttttttttgagacacactgttgctctgttgcccaggctgtagtgcagtggcgcgatctctgcccactgcagcatccgcctcccgggttcaagcgattctcctgactcggcctccggagtagctgggattacaggtgcccgccaccacacctggctaattttgtattttagtagaggcgggggtttcaccttgttggccaggctggtctcgaactcctgacctcaggtgatccgcccgccgtggcttcccaaagtgctgggattacaggcgtgagccaccgcgcctggcccgctgaaggactcttaattctagaggggaccccagcagacagctaccccaaacagatttttagagtcccggagaggtacctctccagtcagcacattttaccttctaggacttcttcaagtttaggatcttaagaagaaaacttgttggttaagtgggaagtgttttgaattgcatccttctcgaagaagcgtttggggaatatgaaggcatgggcggttttgttttctgggcgtgagatttcatgcgcttatttggcgtaggaccacccccacagctttcactgttcacagcattttcccagtttgaccttttgtattcagtccgggtcttcccaaatgctgcagtggcccattctggtttctatggcgtcattaagttttattcagcaatggctgtccacggagcccaaaaggcatgccaccggaagcagctttttcagacatctcctgtcaaggtggctccaaatatggaattcctagctccgctgaaatgaagtgctgaattcaataatagattagcatttgtccagcactctggtttacagaatattttcagatgcattgccacactaatcttccagttctctggtttttttagattaagaaactcaaactcagggtggttaattgacttgcttaaggttcctgacaagaattatggaagcttaaggttgaactcaaacctactgatgctaaaccccatgtcattttatgctgtccctttttaagaaatctcagcttgggcaacatagtgagaccccatctctacagaaaaaatttaaagatcaggctgggcacggtggctcatgcctgtaatcccagcagtttgggagactgagtcggacgggtcacttgagaccaggagttcgagagcagccttggcaatatggcaaaactctatctgtactaaaaatacaaaaacatacagttccctattgcgctgtgcctcagtggcctcctgtgtagggtagaggtagcaacagcacccaccccatagatgacgatacaagtaaatctcctaaaatgtgcttggaacataggaaacacccagtaaatgtgagctgccggcagcaccaccagcagtaccatcccagagtccaaaagtcagtagaccaggacctttggttttaagtaatgtttacctctgcctaattttgttagttgtggctccttcttcacggctaaagagggctaagtgcttgtctacagaggcagagggaagagtgagcacagctgggaggattctgctcagtctgtaatgggcctgggggagaagagccccagggaacagagaggggtgtcagcagctgtagagaggggatgctccatccgggcgtggtggctcacacctataatcccaacactttgggaggctgagatgggaggattgcttgagcccaggagttcaagatcagcctaggcagaaaaacaagaccccatctctacaaaaaataaaataattagccaggcatgatggttcccacctgtagtcccagctacttggaaggcggaggtgggaggatcactttagcccaggaattcaaggctgcagtgagccatgattgcatcgctgaactgaatcctggacaacagactgagaccctgtctctaaaaaaaaaagaaagaaaaaaaaagagagagaaaagggaggctctgagaacgggaaggtaggccctacaggaggctgcccttttggccttgaggaggggctcttggaattgcttaatgttccttaggagagcagagtcagtgcacaggtttgctgagagcagcatcttcatctcttaattaaaaatgggatctaaggccgggcacaatggctcatgcctgtaatcccagcactttgggaggctgaggtggtcgtatcacttgaggccaggagttcaagaccagcctggccaacctggagaaaccctgtctctactacaaatacaaaaattgactgggtgcagtggctcatgcctgtaatcccagcactttggaaggccaagtagggcggatcacctgaggtcgggagttcgagaccagcctgaccaacgtggagaaaccccatctctactaaaaatacaaaattagctgggcgtggtggtgcatgtctataatccccgctactcgggatggtgaggcaggagaatcgcttgaacccgggaggtggaggttgcagtgagccgaggtcacgccactgcactccagcctgagcaacaagagcgaaactccatctcaaacacacacacacacacacacacaaatacacacaaattagccgtgcatggtggcacacacctgtggtcccagctactcaggaggctgaggcaggagaatcgcttgaacccaggaggcaaaggctgcagtgagccgagatcatgctacggcactccagtctgggcaacagagcaagaccctgtctcaaaacacaaagaaacaaaaccacacaaactttgagggggagagactgaaaaaggggaaagacaagctggaagggaaggttctaacccaagactctgggaaggtatgatgaaattttattggcccatattcaggtgatttttttttcagtgcttttagctttgtggaaaactgtaggcataatttagctatctctagggaccaaatgtaaaaatgttttatgaacatcagaaaaatcattccccacaaaatttctctctggatttcacagttgaagtaaagattctacccctcttccttcctccctgcacctctggccccatcttggcgaaggaagtaatccattgtcctccatccaagaagataaattagatggaggcatcgcctggtgctctgtaaggcttgtgaggagtacttctaattcttcatgtgggagggtcgctagtgtgagcagcgggatgagaaggaggcagcaacaactaggacattctcaagctcctgggactgtgcaaataaatagatggtaagctcacagtttcgtgagccaagagcgaggatctgaagtcatcactaggcatctcttcgaggatctctacaggcctggagcagtctgtctgtcataatccataatctgcttctatattaaactgtggccatgtggttctggcaacaccctgaggtacacagagaacaacctcagatgggaatccaaaaatctgcacttggggtttttctctacttactagctgtgtgaccttgtgcaagtcacttaatggtgcctggcacacaggcgtttaatgaatgtggatcaagtgaataaataagtaagccacctccctgagcctcagtttcctcatctgggaaaggaaaaacagtgcttctccaacaggctgcgatcatgtaggtagaattgcttcctaaatggtgcatctcaaactttcatgcccttcacaggagtcacctaaggagctgctcaaatgcagattcggactcagtagttctggggttggggggcctgagtgctgcatttccagctaaccccagggaatgctaatgctgcctggctggaccacactttattattttatttatttatttatttatttttgtagagacaaggtctcgctgtgttgctcatgctggttttgaactcctggcctcaagccatcctcccatcttggcctcccagagagcaggattacaggtatgagccactgtacctggcctggaccacactttattatacagatttacatttttttaaagcagggtcttgctctgtcccccaggctagagggcagtagcgtgatcatggctcaatgaagcttggaactcctgggcccaagcctcccgagtagttcggaccacagggcatgtaccactgtgcccagctaattttttttgttttgtttttgtttttgtttttgttttgttttgagagaaaatgtctccctgtgtttcccaggctggtctcaaactcctgggctcaaatagtcctcccacctcagcttcccaaagtggtgggattacaggcatgagccactgtgcctggccctggaccagactttaactagcaaggttctatattctaaagtgctttccaggtgcttgaaatcattatttcttcagccaatggggtgggagggctgtgccaagggtagaggggaccaaacatggcgagggagctggggacacccacacatggggataaaggaaaatcttgagttccttcagggaaatcctagctagccctgagaagtaaatcagcaacttggtaagcaggaaggtaatagtagtctaaaacaatagctgaggaagttagagccaggagatgtttggttcccctctctacaaactaaagataacatcttaacgtatgtccctgagttgtttttcagaagcccagacccctccaaaagggatccgctggcatgtagacctcagataaacgggtgctgaggactgactctgactatagttcgttgttctaaatttcttcctgagggacctggaggaggccattgcccatgagccagagctaacattcttttctgctgatcccacatgtctagacaaagcttcgcctcctgaaccaatcgcaaatcagaaaatctttgaacccaccttatgacttgtgggtcctgctttgagacgtcctgcctttttaggtcaaaccaacgtatagcttccatatattgatttatgattttacctgtaacatctgctttcctgaaatttacccctgccttttaaaatccttacctgtggctgggcacagcggctcatgcctataatcctagcacttcgggaggccgaggtgggcagatcacttgaggccaggagtttgagaccagcctggtcaacatagtgaaaccccgtctctactaaaaatacaaaaattagctgcacgtgatggtgcatgcctgtagtcccagctactcaggaagctgaggcaggagaatcacttgaacccaggaggcagaggttgcagtgagctgagatcgcaccactgcactccagcctgggcaacagagtgagtgagactctctcaaaaaaaaaaaaaacaacaaaaaaaccttacctgcaagccatcaagagttcatatcttaagcataagccacccaattctccttgcttggagtcctgcaaacaaatgccttcctttctctattgctgcaaagtctcagtgtggacatctggtgttattgcgccaggtgagaagacctggtttggttctataacattccaatgtgcccaggattgaggagattcctgggatgcaggactttgtgtgttagaaccaggagagtcctggatagaacaatttggtcaccctatcgggataatgaaagagaaaggcatgctttggtctaagttgctgtgtgacctgaaaaaggaccaggcagctgattgctcaggtcccactttagaccagttagtctagtacctcctatttcacaggggtggaagccagcccagagaagtccagtgacttgtccacatcacccagctactcaggggcagggctgaggccaagctcccaccttcccactccccgtccagctcagcaccttctccatcagttcacgttgtcttctcttaacacattcctcttgatttggcgaacacagcatgtttatttataaattggcttgtttggagcctgaaatgtggcatcactgattttggctgtgaggtgttcacatttttcctctctttgttttggctcgctaaaccatgttttgtgagcaaaaccacaaagtaataaaaacacaatgaggccgctaaagttgttcaaatgcaaagcatccagaaatgtgacagcatagactttctcagatttattgtatgtcctcagacagtagataaaaatgcatggggtttacttccagggatttacagaccaatataagtaaacagctggggtttctttttaggctgtttctcttggaggtggtgcaggaggttgaggaaagcacctctgatgagcagatagctggaggctgttcccacagtcatgtctcagcgaagaagtcggagttcagcagccatcagaaccaaggtatgtgtggtgatcttcggaatgccactccaaatcctttgcactttcttttgcacacagcaggagttgtaaaagaatgcttccttttattattaacactgagaatccatgcagagagtttacactaaacacatgaatacattgtgttttagaaggctgggtgccctcagtccccagatctttgaattctaccattaagttcaggtaggtttttggagacagagattggccgcatcatatctgtgacactgactcttctggtgtaggtttgcttggccagggagtctgagtgcagcccctgatcagtgcttcatgccaatctgtgagtctgttccaggaactagaggagagagagccttagccttgcctgcaaccagatgaatggttagctttagtggtgaacactttgctttttgaatagtgtggttggctggcagctcttgtcattgtttatctctcaatttaacaaaccaagctgaagcctgagcacagctacaaccttgtccaatctctttagcaacaaaatacctgtgtgtgcatatcttattgctcaaaacattaaacaaggctgtatacaaacacacacacaaacatacacagatacactgtacaggagacccctgataaaacacacaaattttaaaaatttatttttaaacaaatgcagtgggatgatcatagctctctgcagccttgaactcctgagctcaagcaatcctcctgcctcaggctcccaagtacctgggactacaggcgtgagccactgcacctggccatgtagtgaaggactttctaagcaagaccttgacttggaaagttgccaccaactccccagctctgtgagaagttttaggggcagggggtttaaattatcaaatttagctggtttgcagggggagttctttcccagtgatgagttggggctgcttctccccagagtaaaaaatggcagcaaataaatgttagatcacagcctcttcttagtcatacccatttatacatgtcatgagggtcattgccaaagaaagaagtgagttaagtgtaagggaatctggtcgggggtggaccaataaccagactcatccgaacgcttggctgatggttttccagttgctccgtggtttatcctttgtgaagatgcaagtgacaatcagagttggaaacgtggggcctcagctctgcttgataaaccaggcaaggaagagctgagggtggagtaggggggtgccggtggaaggagggtctgaatttgaggaagaaaaaggacagtgcagcaaagagttgggttcctttcaagcttctaaaggacacagtgggctgtaacagagctctctgaatgagggaagcacagcccaccagcagagcatttaccacctgtgtgtgtctcaaatggccagtggggcagttcctgctgtggcctgattccatggacagcaccactcatctcactccccaactctagcacacgttttcccactgggagctcggccaaccattttggatccctgaagggaaagaatgtcaggagtggaggaaggggtggtgatgcggtgaagcctctgctgctagcccctgcaggcagagaaagttccagatgcctcggcctcagtcaaagcaagcctggctgacccataggatgtcagtggcatggggagtggatgtatttggcggcagatggcctgtttgtttatgacaaaaagtactagagatgtgtcaccaagagaggcctatggatttcttaagccaaaacacttggacaaagtctcccaaaaaaatagaaccaagcatctcatagagttaatgattgtctacaggatccctgacaatgtaagcatttctttttccgttctttttttttttttttttttcggagacagggtctcactctgtcacccaggctggagtacagtggcatgattatgaccccccactgcagcctcaacctcccgggctcaagtgatcctcctggctcagcctccctagtagctgggactacaggtgcaccccaccacacctggcatttttgttgttgttgcccaagctggtctcaaacccctgggctcaagcaaccctcccacctcagcctcccaaagtgctgggagtacaggcacgagccatcaggcttggccaaataagcgtttattggacagatccagttctccaaagtttagagcaggttaacttggtagctatggagtatgaccagatggagacatgggtcttgtggccggccctgcgactggctgacagtccagcaaggcaaggaggtaggtacttcacacactgtgcacacccatctcaggcagccgtagacccctacgcctccccaccccacaggcacatgcaggctccagggaaagcaagtagttggcaggtgcctctccaacctggtgtctttgggcatccttgccctgggcgacacagtgagaccctgtctcaaaaaaagtccctcccatgccagctgcctgtgtcccaaccactcaggtgctttgcctctcaacagaatccacctgcagttccctgctaggtatgtctcaaggagccctctagccacccgacttgtctttaatgcctataaaatccagttcagaggaggaaaaatatttatcaggcaagtcctgcctttggaggtatgtacaggcactgacatcagaacagggcagtgagtaaacccggcaccgaacaggccatcagaatagggagccccacatggtaaatgtggctgcgcatagcaagctcacccagggaaggctgggctgcaggttggggtaaagcccttgatgcaggctgtaacatgttttgatgcagaagttattggttctgagtagaaagggcaaggtaagagagcaaagcctaaaaatgcagtttcccccttgagttcttttctctcctcttatttgacttccctcccatgataacatgccccaagggctgagagccactatactgtgtttaacagatggagagaataccttctttaggctttcagagctacagaagctggggctaaaatgccaactctatagccatgaggatctgctttctttttttttttttgagacggagtctcgctctgtcacccaggctggagtgcagtggcactatctgagctcactgcaacctctgcctcccaggttcaagtgattctcgtgtctcagcttcctgagtagctgggatacaggcaagcgtcaccacacccagctaattttttgtatttttagtagagacattttaattatgttggccaggctggtctcaaacttctgacttcaggtgatccgcctgcctcagcctcccaaagtgctgggattacaggcgtgagccactgcacctggccaaggaccagcttgtgagtctagggaacctggaatgcagcagccccaatcttgactttagttaacctgtgtcatatgcaggggctttaaaggtggccaggagcagggcatctggctatctggctatctccaggtagtgggtcggggaggctctgagactgctacagagcagaccattgacagcctgtaactgagtccaaattcattctgcttgctgcgtcatagccaatacgttgagagacaaggagttggagcaaggaaagggactttatttcggagagccagcaaaccaagaagatggtggactaatgtcctaaagaaccgtcttaaaattatgcgggctttgccttgtcttttatgtttaggtcgggggaaaggaaggggctgacaaccgcagacatctggacaccagcaagggtccaggggaggtttgcagaacttctttgtccttggctaacagtctgtcatgtgacaatagccaaacctcctcattcctataaatctttaacaaaaacagttagctgtttacatgcttcccctttaatcccagagttagttttgcaaacggcatgattcctgtttttgcgttttatgtcagtgctctaaagttatcctagcctaggtgcaggaataggtaaaggccccttaaacaaaaatggagttagttatgttagttcttctgctgtttcatggttacaagacacagaagagaacccttgcatcaaaacaggatgagattaggttgttgttcctataaaaaatccatgtggttgttttttggccccctcttcaatattcggggtgtgctgacgaagcgagcagcagctctggagccataaaccaccatctcatctcagcccagggcatgctgggagaggccaggaaaagtcacttctcttctttgctttaactgtcttttctgtggcctcaaagtcttcaaaggggagacttggtgttctcagcactgctcagcctccatgaagccctccttctcatggcccgagggctccacctccgcataggtggaatggtcagggtggctgcgaaacttcatggctggccagtggtgaggtctacgctgcagaaggcacagaggcaaagtcagtgggcatgcccccgcccccatggggaccccacactcctgagcgacagagccaaccaagactgtctcttataagggccctggggcacttgggcctaccaggagccacacaactgaccttcagggaccctctccctaaaatgttccgtgctgtgatcccccaaccactgggaaacctgccgaaagctagagtgtggaaggaggacactttatccttcactgtgtggtctgcagaactcacagctgaaaggttcagcaatacaccaagtggagacctaggactgcaatgtgagggagtggctcagagatggctggcatgatgcttgaggctctgaaaatgccaagataaccctccaaggtagcacaggatccacatcagagtcaacagggggcttattaaaatgcagattctggcctgtgcagtggcttatgcctgtaatcccagcactttgggaggccaagatgggcagatcacttgaggccaggagttcaagaccagcctggccaacatggtgaaacactgtctccactaaaaatacaaaaattagctgagtgtggtggcacgtgcctgtagtcgcaactactcagaaggttgaggcaccagaattgcttgaacccaggaggcggaggctgcagtaagccaagattgtgccactgtactccagcctaggcgacagagtgagactgtctcgaaataaataaaatgcagattcctgggcctgccttagacctgccctatcagaatccctgtggcccagggatctgcagttcccaggtgttacccaggtaggctaagacttcagaatgactaagcctcctaagaaactgggggaatgacctaggcctgtgggttaatgaggctggtgggcttgtgacccacgtggaagaaactagggtcacagaggcaccactgctgcactctgtggggaactcgtaagaagccagaagtggaggactgggggcaggagctgctgagctctgcagccccgagtgaagggggctgagcctcacatcccatgctgcccctcaggctggctcttcagaattgagacattcaaaacttagtatcctcaattaaagctcccagagggcagctcttatcattatttggcttgtctattttatttttatttctattttagagatggggtctcctctattgcccaggttggagtgcagtggtatggtcagggctcactgcagcctcaaaccactgggctcaagggatcctcccacctcagcttcccaagcggctgggaccacaggtacgtgccaccacgctgggctaattttttaaatttttgtagagacggggtctcactctgttgcccaggctagtctcaaactcctgtgctcaagtaatcttgccttggtttctcaaagtgctaggatcttaggaaggagccactgcacctgcccctcaattttagccttaaaagcaggtatcagtaggcaaaagaggcagagaccctggttccctcatggctttgagtaagtactgagcctggcatttgggcatgagagaccataaatcactggagataggctgcacagccactagatgagcactatgtggcactgtggccttctttctttcctctggggattttttctgatttcacaaatgggggaacaaaagcagaggggctgttccacaggacaggagggccgagggagttctgaggtgctgatttatcagggtgcaggacttaacgggcgccagccatctcgaaatgtgccaggatggggtggatgaagttttctcaggtatgtggcaggggagagggagaaggggagaggcagggaccgaatggcccaggagacgccgacgcagaagcagacaggagccctgtggccacagatgacacggacctcgatgaagaagagcgcagcattggatgtggggtggccattgatgtaaattccagccaggatgatggccgccacgaggaggactgccagcacgatgcccacgatggtgcccaggtgcacaggagtgccctttgtcttgggggacaggttgttctgaaggcctgtggagagatcattagggcagacaggggctgcaggggagcagggaaggtcgaaccatggggtcttgggttctaacaaagtctcagagatgaaagccgacagagcctttgggtccacttatccaatacaggaagaggttgggtgggagttggaatcattatgagtaaggcattcatgttcttgacaccatctgggtagttttccaaaatcatgtaaaagttgccccaaatgtctaataaggatcataagagaagttctctctgatatctgtgccactacataagtgctattaaggaattcacaaagggcatcggagggttaagagtttgggatctgaaatctggctgcctgggttgaaatctatgctctgccacttactagctgtgtgaccttgtgcaaattatctaacctctctgtgtcttcattatcatttcttttgaacaaggataataacacccacctaatagggttattgtgaaggttaaaattagatgatccatgtcaagcactgaggaccatgtctcccattttggatgacttcaataagtattagctattatgatggcaaatgaccatagtttttcctatcactgtccactcccagattgtgacctcttgcagggcaaggatgatgtcttattcaactctgtgtcctcagctcttagaaaaactggcaggggctggccgcagtggctcacccctgtaatcccagcactttaggaggccgaggcaggcaggtcacctgaggtcaggatttcaagaccagcctggccaacatggtgaaaccttgtctctactaaaaatacaaaaattagccaggcatggtggcacgcgcctgtagtcccagctactcaggaggctgaggcaggagaatagcttgaacctaggaggcggaggttgcagtgagccgagatcgcaccactgcactccagcatgggcgatagagtgagactccgtctcaaacaaaacaaaacaacaaaactggcaggcccgtcagagaagctcaaagaaagtctatgggatgatctaggtcctctggaagctaataagccaacagtcaccctctgagaacatcctaggcacttgaaatacgtcccgggggagagagtattttccacagagctggaagctcaaccccttttgtgcatgactgaggtaatggaaataacagagaggttaagtgatttccccacagacacacaaattcagtgcccaccactaaaaaacctagttccctgacactaccttgggtggctatttgcctcttcaccctatcctaaaagagataatgaggtagagaagacagatgagcaggttggcaacaaaaatgttgcattcttcctacatagctagtgggtgggttgggagggaactaggggtggcaagttttaatgggatgttgcatgcactcagaaccattgtcttccccatcccctttgctctgctctgcactctgtaagcagaggacacccaggagagaaactatcctggggcactccagggcatggctagggcctctgtctgccaacaggtgggaggactgaggtgaaatgccccaggtgagcctcccctgacctggatggcaatcagcccgcagcctgcagtggctctgatgatttgatgatgaaggcttctgctgatgagcacatggtgcacagcgaggggattatggcccagccacccccacaacacacacacacacccactgcctatggaggagcaatggctccacctctgctgggggacaccatcacactgtgctgcattaataatctttcctctcctgctggaagccctgatgacaatctccagcccccggagctggaaggcactttcatctctactcttgcacaggttgccgcaaaggcctgagctggctctgggcaaagggcaggggaggtgggggcagctcccaccctcagaaaggagattatccttctaggtaatcctaggaggctgcagggagtcccaccttctggcatcctgcaaaaattgtagcggacaattttatgtcctctgccagcctgagtgaggaaagagaagctgctctccaccccttgctgactatgagcccatggggatcagaggggatggccacaggccccacctatacctgccctggctcagtccttcccctcctcccactcctttctgggcagtgaatattcaaggacagagagccaggagaagaaccacaggaggttcagggctgagatgagaaatgtctagggtagacatgttccttcgatctagggcacctgtgcccagaagcccccctgcctccccacccagcaggaggtctgggatgctcaggctgccgttgctccctctccgcactcataaaaatagcccaggcgactgctgcaccctcttctggggtgggtccaagaggcgctgggtctgacgctgagggcaggcagttctgtactcaccgtctcctcctgcatagggattcaacttggtgtcatcttcaaagagagaagacagaaggagcaagattagtggaatcattacagcctttgtcactctgagtccagatgggatgaaagttcagcccaaactttcattttagaggtaaggaaactgaggctcagagaggggaggagacttgctcaagtcacacagcagttgagtgtagctggaggctggggagtaaatgagcggggactggtgagagatgaggctgggagtggagggccggctgcctggagagcaataggaggccatgcacgttcttctgtggggcgacagagagatgtgtaagggtttgaagaggggctttatgtgtcacaaggtcagatcagcctggagactccctggggctgcagtgtgcaggagagagtcccaacccactttctgtctatacctcgaggcctgtagcctgtggctttctaagtaagtttcaagggtccacccttcctgtggttccttcccatgcagatttttatggggaaagaaaagcaagagttccatgtcaggagaatgctgtaaatgactgaagattcttgccctaagcacctgaactttatttatttatttatgtattttagagagagggtcttgctccgtcacacaggctggagtgcagtggtacaatcacagttcactacagccccgacctcctgaactcaagtgatcctcccacctcagcctcccgagtagctgcgtctggctaattaaaaaagatttttttgagatgaggtctcactgtgttgcccaggctggtctccaactcgtgggctcaagcaatcttcttacctcagcctctcagagcactgggattacaggcgagagccacctcacctggcctaacaaggtatttaaacacaactttgaatctatttcgttactgcaaattgaaaacaatgaattgattcatcaaaactaagcaaaggaacttaaatatcactgggcaaattaacttgatttgaatcaacttgttgcaaatctagaccattgaagatcaattatggctcagtctgcacctaccactggtagacaaaaggacacagtgccgcccactgccagtccctcccagagtgactgaaggtggccacactgtgcccacgcagcctctctcccactcaccaagggctggttcccagctgccatcttgctggggctccatgtaatgcacattggctcctgagttagtggatcacatgagaactcacacaggaagaaatgcatgcaatgttgatcaaatgagtggtcattttctgttgttagttgtcacttcttgtggctatcaaggtgttctgttctgttgcttataagataagcccttctgcacacagttgttctgggtgagtgcctgtctctctttgcaatcaaatgcatgggctttgtgacagctacttgccactcagaggtcatctggttcatttaagtgagtagcgtttgactgcaagtgaacggctcttaaatccaggccccatgtctcccactcctcctgccctgctgctttctacttctgcctgcccaggcaggcccctctggctggagtgctgggtcccttcattcaatctccctgttagagcctgtaccctcatagaatgtatgggaaagactctatcccacacctgcctctgcaagtctccctgtgtgggctgtaaccacacaggcaggagagtgactcaaactctcctgccaagatgccttgcaagttgggcatgtggggggaagtcatcattaaaaatgttttttcttataaaccaggcacaatggcatgtacctgcagcacttagtaggttgaggtgggaggatccttgagcccaggagttcaagtccagcctaggtaacatagcaagatcctgttccaccctccaaaaagttttttctcttatagatgtaacttcagaatctttgccacctcttccaggactggaaggacatagagccctaactgtcttcactttttactctaatgaatgttttctgttgggaaccactacacaaaacatggaaatgagacccattccttagctggcaggggatgcacacagataataaaactggcaaacagaactcgctacctctgtaggacagaggacctacatggtgggctgtaggacagcccagggggctcagtaataacaagtcaggatttaggcttggcccccaagtgctgtgccctgggctccccacgccaccacagacccccttctagcctctgacactgtgcctccaccagacactgtctggctaaaccctctgggtggggcagggtatgtttgcagcacccctccccgccctggcccagtgctgggctcagaacatgccctcagtaagcctagggggttaactggcagtaactaatcagggactacctccttgtaggaggagctttctttgactggaaggttaaccctggactctgtcaccagctccccaaagggcaaagtttctttctgcttctttttcttttcctttttctttctttctttccttttctttttttgagacagcgtttcactttgtcacccaggctagagtgcagtggtgcaatcatagctcactgcagcctcaacctcctaggcttaaccaatcctcccacctcagcctcctgagtagctgggattacacatgtgcgccaccacgcccagctaatttttgattttttgtagagacatagttttgccatgttgcccaggctggtctcgaactcctgagctcaagtgatctgcctgcctcagcctcccaaagtgttgggattacaggcgtaagcctcctctcccagcctctgcttctttttcattgaatcccctgcagcaccaccacgtgctctgctctcagtgccagctccttgttattccagagcaacttcagagtaatgggagctgtcggaatctgcctcactttttcacactttgctactctgccctgaccctgaattcacatagacccttttccatttctttcagcaccaagagaggcagtggggttgaggggaaagatctctgcttttggagctagatgaaacctgactctatcccttcttggctgtgtgaccttgggaaagtcatctgcctctctgagccttagtgtctcctttataaaacagggatataacagtatcaagatccaggattgttgggaggactgaatgttaatttatgcgctactttagcatcctactgggcatatagttggtccccacaaatgctgatgctttctatcattcattcattctcctccacaacctccccccagccaggtccatgggtcactgactttgttctctagttttctaggtaacgtttagaaaggcaggggacacaccaggtgcagtggctcacgcctgtaatcctaagactttgggaagccaaggtgggtggatcacatgaggtcaggagtttaagaccagcctggccaacatggcaaaacccagtctctactaaaaatacaaaaattagctgggtgtggtggtgtgcacctgtagtcccagctacttgggaggctgaggtgggagaattgcttgaacctgggaggcagaggttgcagtgagctgggattgtaccactgcactccagcctgggcaacagagcaggactaagtctgaaaaaaaaaaaaagaaaaaaaaaaaaagaaagaaaaaagaaaggggacattgtggaaagaacatctcaccacttacccctcccataaccctgaataacctactttgcccctttacgagcctctttccttatctataagaaaggactatgggccaggcatgggggcttaggcctgtaatcccagcacttttggaggctgaggcaggaggatcgcttgagcccaggagtttgagatcagcccgggcaacatagtgagacctcatctctacaaaaaatttttaaaaattagccaggtatggtggtacatgcctgcagtccgagctgcttgggaggctgaggttggaggattgcttgagcccaggagttgcgggctgtggtgagccatgatcactccagtgcactccagcctgagcaagagtgagaccctgtctcaaaaaaaaaaaaaaaaatcctaacatagggctagagggggaagaaaaacgtggctgaataatgttttaaaatgttaacttttttcttctttcctttccttcttgccattattcctttcaagcagatatttggttcaggggaggctgtaaagaacccacaagtctttcagtcttagcctaaggggaaggggctttcaaagctggatgcagggttttgttttgttttgtgttgtgttgtgttgttctgagacagggtcttgccctgccacccaggctggagtgcagtggcacaatcttggctcactgcaacctccatctcccaggtttaagcaattctcctgcctcagcctcccgagtagctgggattacaggcgcccacgaccatgcccagctaatttttgtatttttagtagagatgggtttcactgtgttggccaggatggtctcgaactcctgacctcgtgatcctcccacctcggccttccaaaatgctggaattacaagcgtgagccaccgcgcccggccaatttttatatttttagtggagacggggtttcaccatgttggtcaggctggtctcaaacccctgacctcaagtggtctgctcacctcagcctcccgaagtgctgggattacaggtgtgagccactgtgcctggccgagatgcagggtattgaaaaaggataagggagaggaatgtctcagacatagctacagaatcctggagggggcatgggagaaagggaagagatttgaggcctaggaccggaggagcctgcacaaggcttcctgggacaccgcctggtgcattcacggggatggacctctggcagcttcaaccaagacccccaggcctccaggtagcagggaagcccctagattgcaagacctgaatagtcagggtggatggacagctgaggtggaattccccatccatcactccagggcctgaaagtgagaagtcaggtgatcatacagaaaaacaaggcagcctttctctcacgcctgagtgtatggactgagttcatacctgctacagggatgagccttttcaggttctgtgaggactgctattaagattagctgagataaggtatataaaatacctggcactggcctgggctattaatttttcccctcttcacagtgaattgtctgtagccctgatgtgggccagtacagtggttagagcccaggagtagagttcaagttctaaatctggctctgcttctcaccagcaagtgacctaaactgtctgaacttcaggcccccttagctataaaaggatggggcagttcccatcccatgagatcatccctgtcagggacagagagggggccccagaggggtgggtagctctccttcctggcctcctctctgctcccctcctgggctcagaacttaccttctgtggtgaggctgtcgatgaagagggaggaggaggtagtggtgaggtctccatcataggggctgaaggaagtgtcaggggaggctgagtcgtggtcctcatcctggaagtcctcgcacatcctgccctctgcctgcaggagagagccagtgctgtgtcttgaatgcatttacacctttcccttcatcctgaaagcatcttctcttacagggcaatttatctgtcagctgcttcaaatccttcctcaaggaaggggctgagatgccaatcttaaataaatagagcaaatctgaacggtcaccaacagctaacttcaaaagtaggcggctggacagggtttttttaaagcccagactcagactaataaatagactgtggtaagtgtatggccacagggtctggagagttgatatttaaatgctgggcccgtcaccttctagcagcgagatgcaggccaattcattaaacttctctgagccccagttttcccctgtgatcgatcaatgggggcaatggcccccagcttttggttcaggttaaataagagcgagggtagggcaactcacagtgacatgcttggcacatgcagcatgcttgctttgcaagaagatataaagggagggggcaaaaaagagggcacagatgaatagacccatctatgttagtctatggtgtgagaataggatgctttccacctagaatcagtgttgagtgtactggaaaattcttgcagtgagaaggaacctggatgggattctaaagaggagatgcctggaaccacccttctcactcccagaatgactgccttcctcaaaagccagaggaccagaggcttagcaggtgcatcattaaggtcagcaggtgcacagtctcccagaggagccagcagtggctgaggccatgcccaacatcccctctgcatgcaccaaaagaattccttgagagctgcccacttaaggtcaaggcatcagaatgctcgtctcagagacccacagagccctctgaaaccttccaaagtgggtctgattggctcaaggcagtctggaaaacaaatcttagatggaagggaggatattgccaagagctaatgccaccttgagaagagtttccaggggcaggccctactggctgccctcctgttccccaccacctggcacaggagttgcagcagatacttatgcttctcacctcctgtgcacagccatagtccatccactcctggcgatagcggtcaaagccactggagcatctgcaggaggaccaaaaggacagagttatgatgggattgacaaagaagccttcccctttcactgttcagtaacagctctctgctgatagtgagaagaggagccaaggtccccaggctgaggtagtcaggcactcccattccctctacttccccggaagatgaaggtatttgtggcatccctgccttccttcccacccagctccccaggaccaaggccacatctgcccatgtgagtaggtgtaggggctagcaggactgcatgagctccagtgatcctcaaggtcgccttgactctgagctgccgtgacactgctgagaatccaggcaattcacatacgtgttttcatcctggttgttgagggacctaaacttgggaaagagagtagggctaaaggtaggcctcagcagacttagtcaacacctccccatgtgatcattcaagggcatttctgacggtcctgccagagaggctgggagacaactggctgacaagggtctccggagagggcattggacagctcagctgggctggaagacaccaagcgcccctgtagggaaaggatgggggcatgacgatgcaccagagaatgttctccatgcatcattcccaacttttcgttctttactctttggtgctaggggaacccaccaagccctactcaagcccagggatgtctgcatgggaagaataacatcatgaaccaccagtgccaagaaggaattctcagcaggttaactgcaccagcacccactgaggtttggtgaggccaagggccaaggcttgccaggagctgtcagtctttccttctgcagatgcctctgggctctgagctgctcctcctgcagcagggatggctgaactgagccagccacactctccttctgtcaggtcctctatgcccactactttgggggatggaggattaggaaggctattggaggctgagaactaaagtttcttttagggctgggtgtggtggctcatgcctgtaatcccagcgttttgagaggctgaggcaggaggattgcttgagcccaggaatttaaggctatagtgagctatgatggcaccactgcactccagcctgggtgacagagcaagaccctgtctcttaaaaaaaaaaaatagtttcttttagactgtgctaactgattctttcaaagattgagcctttggtatgggtttatgacccccatttctggagctaatcctggaattaacattacccttagactccagagtgggtcatggcggggcgggggcaggcaggcatctgccgtgagagacgaaattgtttaaatccattccagcccaagagcaaggagaaaagctctgggaggctgtgaaaggcaaagtgggtggaggggaggggagcagagaaccatgcagggactgactgcagctgttggcagagagaccatgtcagctggccctgccctccgggtttttagggacctaggttcagctctcagttgcagctgaggctccagagagcttgtaagaagggacaatgtgcaggagtgagcccaggcccatggggcgcctggggatgggatgattttcagcctgcaccagccatgctcccccaggtggagtttctctgtgctcctctttgctgacacaactcctgcagatgcacacagtcagaggccttgcccttcccccagcctgaccaacctcctaatgttgaggagggctcaaccctcatttaactcatagtctctgaatttgggcatatgctttaaatgggggttgtgttgatgggagagtttggctgtcatctgacccattttgcagttctcatggctcagcgcttgtgaaagctgagtcatgtggtggcagccagccccaggatcccagggctcatctgaggccatctctccattgcttagaccatggttctcaaatttgaaagtacacaagagggaccacttcaaaaatcagatttctgggatcctggttccagaggatcatattcagtgggatggggcccaggaatctgcattttacaagccctccaggtataaggagagcctcacagtctgcagactattctgcaacgctctgctccaggaagaaccaacctggggtctatcctacatattctttctgaggctctgtgagtctcatgcgaaggatgctgaatgctttgtaaaaatgcttcttgcggctgggcgtggtggctcacgcctgtaatcccagtactttgggaggccgaggcgggcggatcatgaggtcaggagatcgagactgtcctggctaacacggtgaaacctcatctctactaaaaaaaaaaaaaaaaatacaaaaaattagccaggcgtggttgcaggcgcctgtagtcccagctactcgggaggcttaggcaggagaatggccagaacccgggaggcggagcttgcagtgaaccgagatcgcgccactgcactccagcctgggtgacagagcgagactccgtctcaaaaaaaaaaaaaatgcttcttgatatcttgatagcctgggtgcagtggctcacacctgtaatcccagcattttgggaggccgaggagggcagatcacttgaacccaggagttcaagaccagcttggccaacaaagtgagaccccatctctacaaaatattagaaaaatggccgggtgtggtggtgtgcacctgtggtttcaactacaggggggactgaggcaggaggattgcttgagccaggaggttgaggccacagtgagctgtgattgcaccactgcaccccagcctggatgacagagcaagaccctgtctcaaaacaaaacaaaaactgcttgaggagtttaaataacagtgtgtttgttcccacatcttcctgaatcacatgaccccagcccattttacagggtaaacaatctgaggccccaagagagtgaataaaagcacagctggtgggaagaacacctgggagacctgatgggcacaccccatcccctctgggcccagagctgtgtcctgtgtgctaggcaggctgcctataaaggcgagaacttctacatttgcagcaggatattggaaaggagcaaaggaatcctggaattaatgttactcttagactccagagtgggccatggtgcagaggcaaaggaaatcactggggccggggcagtggctcacgcctttgggaaggccgagatagatggattacctgaggtcaagagtttgagacaagcctggccaaactcttggtttggtgaaaccccatctctactagaaaaatacaaaaaaattagctgggtgtggtggtgtgtgcctgtaatcctagctactcaagaggctgaggcaggagaatcgcttgaactcaggaggtaaaggttgcagtgagccaagatcacaccattgtactccagcctgggcaacaagagcaaaactctctcaaaaaaaaaaaaagcactggaaaggagcattggaaaggagcagcacgacagctgcacaggaactcagagactataatttagcaattttcaagattgccttaaaagcccttggagttcataggacttcccactctcatgagaactctagtccccaaggaaatctttttcttccccctcctcctgtcatttatttatcttggacagggaacagagcttgaatgctgagtctaatctgtgaggaaatgatttcagaacaaggagtggaagaggagatggatttaagaacattatcactgaaactgaatctcacccagaattttctgagcttctaaaagcaagcaaacacagctttttagctctcccaactttccatggatgcctgtagtccacacccctggtcttcagaaaaatcccttgcagcccaagaaagatcttgaggtggtgttttggggtcatgggtctttggaccagactttgtctctgaactggcagttctcacacttgtttgcagatgaagcatgatgttaaaatgcagcttcctgggttctctcccagagatcctgatacagagggtctgggatgggtcccaggaatccagtgtgtttaactggagcccagggtctaatgcccacagctgtggaacactccgagaagccctgttccaggatgaaccctctcctcctgggtgtgaggagggagcctgagtagctggaatccctaaatggtcttccagaagcccccaggccatgttcttgtcccaagagtcagagtggtactggccagagatactctcatgttggctgactgtgggcagtgaggccaggacggggccatgccaccctcttcccctccacagtcggccagtgggagtcagcaggtaaccctgggcacaaacctctggaggacatggcaccagctgcagttgaaggtcaggtctgaggacatgcaggcgtcacagctcctatgctgcaggcaggctgcaagagagaaggcagtggccgctcagcaccgagcctctccttgggctccaaagggtgcaactctgaattcctggtatttacagaactatggagcccctgactttgaggagacctttaaggtcattaatgccacctcccttggtccagtctagccccaattcctaacttctttttttaagggatgaggtctcgctgtgttgcccaggttggtgtgtgatgacctgatcatggctcactatagcctcgaacttctgggttcaagtgatcctcctgcctcagcctccccaccatctcttcctccctccctacctaccttccttttttccttcttctgtccctcactcccttgttccctgcctccctcgcttcctccctccctagcttccttccttctcactagaaggtcaggccctaaactgggtgctggggattcagcagtgagacctagtccctgccttcttagggcttagactcatatggggacacagacactaaacagataatcaaaaatcactacagaattagaactgtcacgaggtctatgacggcaaatcacaaggtgctgtaagtgtgtacaaaggaatctcacctagtcggagacattatactttcaggtgtgtatcccacagtcaaagggttgaaagggattttttaaaggtcagagcatacaaagtagcaggtatgtaggatgaacaaggctagaatctactgtataacatgaggactgtaggtaataaaattgtactgtatgtggagttcatgctaaatgagtagattttagctgctcttgccacaagaacaaaaaatctaagggaactgtgagatgatggatatgttaactgcttcatcatggtaaccatctcactgtctatatgcatcccatagcatcatgctgtatacctgaaatatgtacaataaaagttattgttttaaaagatgctctggttgcccccagtgcttgttgggggcactcactgcccactcctgatgttcggtccatggggagaaaacagctctcctgggagagaagaagtcaaggcagaaaggtcccatgtgcagagccgagaggggaacggcccagacgtgatcccagcagcagccagaactgctaccaggctgcacagagtgaaggggctggaattagtacgaatgaagagggagcgacagctggggcccagcctgggcaggacagagccagagaacagagagattagtgggaccaggttgctggagggcgcgtgaacccttctggcacaggccaggcacaggagcagcagggcagggggcgcagtaggcacgggggctggatttaagagctgttcacttgcaatccagtgctactcacttgaatgaaccagatgacctctgagcggcaagtagctgtcacaaagcccgtatatttgattgcaaagagagacaggcactcacccagaacaactgtgtgcagaagggcttatcttataagcaacagaacagaacaccttgatagccacaagaagtgacaactaacaacagaaaaatgaccactcatttgatcaacattgcatgtgtttcttcctgtgtgaattctcatgtgatccattaactcaggagccaatgtgcattacatggagccccagcaagatggcagctgggaaccagccctgggtgagtgggagagaggctgcatgggcacagtgtggccaccttcagtcactctgggagggactggcagtgggtggcactgtgtccttttgtctgccgtggtgttgaaggccctgggagagtggatggaaagagccatgggcaggaaagaagcaggggctgccctgtgcaggaggatgagcactctctggctgttttgttccctgtgtatccagagggtctggaacagtgcctggcacatggtatgtcgaatcaatatataagtgctcttgttatccccattttatggaggagggaactgaggcttggagagagtcgtggagctgacagtgagaggtctgggtttgaaccaaggtctgtttgaacatagagatcgagctcttagccttgaggtctcactgtgggtttcccctgccccttcctcagctctcactcccaccccaggccacttttttatgggtctctcctagaagagggaccaggagggaccagctacagaatacgatggcttggagataagccactcacccctctgaagtaatctggacaagtccttcccacacccaaatggtaagggagaagccaggggatacagagagttttctccctatctggtttcccaggggctcaaatcacagccttgatagcattacccctccttcaccagctgcttccaggtgggagccctgcccttgcctttcccagtgactttggaggccccttaaaagactccagtcaaactggccacagagaaactcctgggatcctcctggggtattcataacacctactgacctttatttctcatcaacatttcagatggcctgaatgctattaaatgctcacaaaattcaccggaggggtgagaagtaccttaaatgtacagtgtcccagaaatgcattcccaaaacatttcactgcttccacccaggcagtcagccctgcccttggatgtccttgctcctaaatgcagttttatccacatcatagaggctaaggtttgctctcaccagtcctcgaggaaccctggttctcaggccctgagccttctgccccgatggagagtgatagggttggggtatggctgtgacctctaaagtgtcccagccctgtgacccctaaagtgtcccagccctgtgaccccctggtgtctgagtcctttctgttgtccagggaaagacacctgctgagccctgtctgagacatggcctagcatttgagaagatcctccctccttctcttcctcttccttctccaccccctgctctcaggacctccaaggaagaggaagcaggggtaaagagaggcaagaaatgccactgaagaccgggcatggtggctcatgcctgtaattccaacactggacatggtggctcacgcctgaaatcccagcaccaggcgtggtggctcacacctgtaatcccagcactttgggaggccgaggtgggtggatcacttgaggtcaggagttcaaaaccagcctggccgacagagtgaaaccctatttctattaaaaatacaaaaattagccgggcatggtggcgggtgcctgtaatcccagctacttgggaggctgaggcaggagaatcacgtgaacctgggagatagagattgcagtgagccgagatcacaccactgcactctagcctgggcaacagagtgagactgtctcaaaaaaaaaaaaaaaaaaaaagaagaagaaaaagaagaaatgccactgaggcagggagaaggccatggcttcagcaggaagctgggggcaccacaagatgggagaggaaatgaagaccttcataaaacaacaagaaggaagatgctgtactccttcccgcagtctcagctgtcccagccccatcccgaagagcatccaccgcggatcctgtgggctccacaacagcaggtggctgccttcagcatgggtgagtggggtgcagagggccagggtcccatggtttatggaggccacctgctaagtccctccattgcctcctgcctgtggaccgcagcatcacctcctctaaggagaatacagtgacaaactgaggcccgtctagttcctggatcaccttttctgggggctcagtctaggcgttctcagaggtacagctttcccgggtttcaattatgtgggaataacaatagctgtcctagatcaagccctaacccccaccccaaacccagaatggacccatcaatgtcagagctgcggccgatgtgctcaactccacctaggtggttctcacccttaccctatctctgggagggaggtggcatcaggctcgggttacaaaagagagatggagggccccgaaaagttaggtggctgcacaaaacaggagtcagtcatgggcctgggacatgaagccagtctgcttgactccagagctctttctgggatggcggaatgacccctactcactcggcaatggggtgaactccacggccgacatgctggtgaccttgctggggtccagctctatgcggtgatattcaaagatgctccttcgccgagattctgaaacagaggcagagcctgttgtcaggagcatatcacaggcagagggcatcgaggcctcttcccggacagtctgacaggtcagcctgctgcactgaaggcagtaagtgcacccagcagcctgggacaatgatgttggcgctgctggagacagggacaggtgcggacctggagaggagagtgttgtggtgtgaggctaagtgactcaacgcagagacctggctgctcttgggggcaggacaaatgggatcccatgcttgcttctccttgcctctgcgccttcacaactgctattcccctgacccaagatgttcttccaccccttcttcctgtctagctcatccttgcagatctagctcaagggccacttcccctgagcagccctccttggccagctccctcctctgcctggctcaggccaggtgcccccctcccactgcactcaccacactgtggacatgagggtctatttggaggctggggatgtgtgagaccatgatcatctggtcctgaacctcgctgagtgctctgtgaatgtctgcagatggacaggctgacttttgcatgttgctgtccaccatccacctcacccctcctggacaaatcccccagcaaggctcagggcttgcagccaggctcgagtcctactttggtccctgcagaaacttctcacaggacctcagagtcaggagatccaagttcgttctagttctgctcacgacttgctggataacctcaggcaagtcatttggacctcagtttcttgtctgtggagtggaaagacagaaacacctaccacaacacccttgggaggaaaaagctggaactgtacatgaaaggcttcttttttaaaatgacaatctgaggtgctctgatacttctctctaggccacgatacccacccaggaaccatgacttggggttggttttcttcaattttgaaaggcaggcagcccagccaggcatggtggctcatgcctgtaatcccagcactttgggaggccgaggcaggtggatcacttgaggtcaggagttcgagaccagcctggccaacagggtttttagtagaaaccctgtctctactaaaaatacaaaaattagctgggtgtggtggtacacgcctgtaatcccagctacttgagaggctgaggcaggagaatcgcttgaacctgggaggcagaggttgcagtcagctgagattgtgccactgcactccagcctgggtgacaagagcaagactgaaaaaaaaaaaaaaaaaaaaagagagagagagaaaaagaaagaaagaaagaaagagaaaaagaatagaaagaaaagaaagaacggaaagaaagaaaagaaagaaaaaagaataagaagcagacagccaggaattgagctttgagaatgagttaccccacaagaggaaagaaccactcagtgtttggtccgcccaacaccctttcgtcttctggaaacagcagcattccccttggggtactgtgcctggcccattcctacaggtgggctgaaccacagctgccatcttcttccatgatcctgcctctctggccacgctgtgattgttccaggcctgggtatcggctgtgagctggaccaatcagagacctcccctgggacttttcaactgtaaccaagaggccttttgctgtctggtaatgaagctgagaagatgcaggctcagaacctgtgaatggccacagtaccgggctcatggggaaaggcagagaatgaagccacctcatggagagaaacaggaagtgctggtatgttctgggccctggggttccaggacctgccccactattcagctcttcttttggttctttgggctacttcagtatcctccgtgcaccccccttttccatttaagcgagtttgaattgggttttcgtcactagaagtaggtggggacatacgtttctcgctcggctgaaggtggtttggaggaaaatttcccaaggtggcagaagagctgagtaggggcatccacaaaggggtgggcgtcccgtgccactgctgggtgccccacccccacatcccctcctatgtaaggaacctagaggagctttgtccatggttcacatagtatctcattatttatttacttattgagactgagtctcgctctgtcacccaggctggagtgcagtgggatgatctcggctcactgcaacctctgcctcccaggttcaagcaattctcctgcctcagcctcccgagtagctgggattacaggtgcccaccaccacacctggctaatattttgtatttttggtagagagggggtttcaccatattggccaggctggtcccaaactcctgacctcaggtgatatgcctgcctgagacccccaaaatgctgggattacaggtgtgagccaccatgcctggcctgtatctcattatttatttatccttaacgttggaattagtccctcctacttaacccaggactgcgcccccgtgggtctggcaccaaagcatgctctcttcccaacacaatgccctgctgcaggacacttcagcccctgaaacattcaagaccttggaatgtcattccatgcagtgaaaagaagactactctggcattggtgtcaataaagattccctggagctgagcagcatctacatccctgaggcctgtctgaaatgctggtgccccccactcccatgccactaggagggtgcacctgctacccacaggccagatgctgctccaggccgagtggaaaggggaaagcagatgggggcactgatgagagcatggaggaaaagaagctcggcccccggagggtgaccacacaaggagaggaggcttagggttgccgcagctgggcagacaggctctgcccttaccgcctgtgtgaccttggacaagggactcagtgagccgcatccacacatggggctggtgatgccatgcaaatggtgttgtcctgagaattaagggagacactcaacgcacaaggaccccaggagccctcgaagcatgtgagccccttttctctctgccccgactgcttttttgctgttcttctcatggctgagactctagggcattttcagcctcttctaacccctcaaagtccaccttaagcaatgtttataaacttgaacatgaggaggaaggatggcacgcattgctttctctttcctgtccttactctgtctttctccctctgtctctctctctctaggacggcatatttcttgtcagcaagtctgatgggtcccccagttccccgctgctgtggagagagaggaggcccacagaggcggcctgaccgcggtactgtgctggcactccagacgccctgttcccacccgtcatcctgcaggcctctcctctcttctgctgcccccacagtccaggctgcctgcttctcctgctgtggatgccactgcccccaccctagcttccccttgtttcttcctgattactgtttcttgcttttgccaccactggagaatgaggtcatgggagcagtgggggacggcagtgctcaggtggtgaatggactggggaccctggagactgaggtgaatttcccacgccccctctgagggctgctcagagagtacttatcttggaatccatctccccgcaacacacacccactgactcccatggggagaggcagtggagaggactttagccttggtcttcctttcctaccaggaggatgacagctccagccctgcagctccttccttcgcccgactcctgcactggagccggatggtttagaatgagatccaggcctcctcccacgtctccctcccttccttccatcccaggcagatcagggaacttgctcctcctcaggaaagcagctggacagagtgggtgggatgaggagtccaggtggtccccaaggcgagcactgcgcaggtgtgggctttatgagagaggagatgagctacagctgcagagactcagacatatcaggttgagagagcaagggagttaagaagtcaagttggctgtacacctgtaatctcagcattttgggaggccgaggtaggtggatcacttgaggtcaggagtttgcaaccagtctggccaacatggtgaaaccccgtctctactaaaaatttaaaaaattagccaggcgtggtggtgagcacctgtaatcccagctacttgggaggctaaggcgggagaattgcttgaacccgggaggtggaggctgcagtgagctgagactgcaccactgcactccagcctgggcaacagagtgagactctatctcaaaaaaaaaaaaaaaaaaaaaaaatcaagttgtcttgccattcattcataagtggggaaactgaggttcagacagattaacccatagacagatacaactttgtatagcactttactttttcatttatttatttatttagagacagggtctcgctctgtcacccaggctggagtgtaatggcgcaatcacagttcactgcagccttgacctcccaggctcagtaatcctgcctcagcctcccaagtagctggtattacaggcacaccccatcatgcctggctaatttttgtatttttagtagagatgggtctccctgtactacccaggctggtctccaactcccgggctcaagcaatctgcctgcctcagcctcccaaagcgctgaggttctagacatgagccaccacacaggccacatctctttacaatttaccaagcctagccattaagtagacggaaaacatctacttaaacgagaaaactacaagagcacagcgccaccatgcagcacatttgttgactccttcagcatgtcggtgcagacacctgctctgtgcaggggctgtgctgagtgcagagcactctgttagctcgcagccttgcaggttccctggagctgcaccatctcatttccccttacaacttcctgaggtgcacagacagacatcgctgctctccccactttacaaaggagaaaagtgagatcggagaggggacgttatttgcccaaagccacacagtctttgttttaaaatcagaggctagacttttaaaaaacctcagggctggaagccactgtggctccagaaagtcaccaaagttgtgagtgcagataaatatttaacaactgcctgggggctggggtgcaggtaggggcagaggagtcctgaattgccgttgttgccaatttctgtggtgtaaatacttccacggtagctgacttccagctaccctttcaaaaaagttactgaacatggagttaggaagagacatgttcagttgcctctcacccagctgcatacatgatctccagcacacccctgctgagagcttcctgatttgtgtttctaaaagagtcaaagggaaacatttacatttctttcttttttgttttgttttgttttgttcgagacagggtctcactctgttgccaggctggagtgccgtggtgcaatcacggctcactgcagccttggcttcgtgggctcaagtgattctcccacttcagtccctgcccccagctccacctcccccaccaaaggctcatgccctggtaatttttttttattctttggtagagacagggtctccctatgttgcccaggctggtcccaaactcctggcctcaagcaatcctcccgcctccaattcccaaagtgctggggttacaggcgcgagccactgcgtcaggccacatctctttacaatttaccgagcccagttgtttatttaaaaataaaaacatttatttaaaaattacgggcacagtggctcatgcctgtaatcccagcactttgggaggtcaaagtgggcgggtcacctgaagtcaggagtttgagaccagcctggccaacatggtgaaacctcatctctataaaaatacaaaaattagccaggcatggtggcacgcgcctgtaatcccagctacccgggtggctgaggtaggggaatcgctggaacccgggaggcagaggctgcagtgagccgaaattgcactattgcactccggcctgggcgacagagaaagactccgtcttaaaatatatatatatatatataaaattaagccaaaatccaaaagatggaatgactgtgtgtttgtctcctaaagaaccctaagtctgagagaggaggccccgtggcaagcctcgtaaatatcaggcagtaactgccgggtgtctacagagtcactgtggctctaagaggagggaaccctccatggaaagctgaggtggcgaggggttcacagagccccgcacacgcatgtgcacaccccagccctccaagacacacacacacctgcacatgagcacatactcatatgcacacacatatgcaaccctttgacacaagaaagaccctttgccaagcccgagtgggatctgacagagattggaggatgggcacctttttgtaattcacatgcccagaggtggcaccaaggccacctgtgctgcaggtgcccctgagtgatgccaatggccatgagaaggtggcctgggctctgagtaagcctgggggcctgggaatatctagatgaggatggaaagtttgaagcagactttcacacaccatccccactcattactcccaggggccatctctccttccccttcagcaccaaaacgcaatgggatcaaaaataaacatgaaactccaagtctcccatgtcctgacttccagggtgcctgaggccataggttctagagtccaatgtcaacctttcttgcttcaactgcctcatacttcaagactcagctcaaatgacgtcccctccttgaagacttcccccactctcaggcaaagtgactgccccccgacccggccccactctgagtctacaactccctgagcaatgtccagtgtcccccattacatcgcttggtcaatatctgctctcctggccactcccgcagccagaccacaagctccgctaagacagagtctgcatggaatttatctctgtacctcatcccctagcaccaggccttgcacttaacaggaccttaagaaatgactgtgagtgaatgaatgggttacaaatagtcatgaaaacctcagcaacttataacgtcagcccacagcccaaaggaagcacgccctccctccccagcccaccacaaattactgccattctcaaaaggacaaccctgaaagaccacagtaaaccagacatgccgcctcctaagctagatctcaaagcgggaggagagctggctttcaggatttctccacctgcaaggctgcagggcagagctttccctcatcagaaggaaggggaaatgggagggacaaagggactcagggtggggcacagatagagactcagacttttcaagggaactgagttcgaggatagagacacaagtggcagccagggaagccaagtctcctagaaacttcacaccaggctctagggatgggtttccccaccatccgggctggggggcagagttggggatgtgccccaagcatgggtgcagccagggatgccagctgtcctctgaaaatacagtccttccagcggagtgggggaggctgagtggtggcagaaagggggatgagggtggggggtggaactatatctctaattgaaactatttgctcacttcaactgccagcttgtacttgttcgagtgtgggtttggtaatatttttatttttttaataaaagaatccttacgccccgccccccccccccaaccccccaagcctgggttatttgttttggattgtttcaccaacatctggagcttgcccaagacaatgacttccatctccatgaccaacagatcctttctggaaccaagacgcaggcttccccagagcaccatttctggcagtttaaggtgttctgttttatctctgcttccaggcatcaaagattcagaaatactcaggtccagacttggcaaacactgctgcccaaacaagaaatgtttttgttttttgtcttttttttttggcgggggggttgtttttgttttgttttgtttttgtttttgagacagggtcttgctctgtcgcccaggctggagtgcagtggcacaatctcagctcactgcagcctccacctcccgggttcaagcaattctcctgcctcagcctcccgaggagctgggattacaggtgcctgccaccacacctggctgatttctgtatttttagtacagatggggtttcaccatcttggccaggctggtctcaaactcctggcctcaaacgatccacccgcctcggcctctcaaagtgctgggattacaggcgtagccaccatgcctggccccaaacaagtaatgttaatggttcaagtgagaggtttgcatgtccctttgtgtttcaatgccagatgcccatgggagagtgctggcttggccagaagaagttaggagatgacaggtcgatccacaaactcccacctggaatgggtggttaccgtataaaaaaatctaagaggttgggttgggaaaaagtcttcatgcattcttttgttccttggctcatgtgattattcattcaataatcacgagtggagccccagcaggggaccctgccccacgggggagaagtaggggggtccctcagcattgaagcaaagcagaaaaaggcagagaaagaagaggccagaaatgactcagggagcagagtagtgggaaaaacagaagtgagaagggaaaagagggaaggatgggcccccagatggattaaaaacttccaacgaagggcactttaaaggatcctttatcagaaaaggcaaaattggccagatcctcagcttctccctgcacccacttcctcacgtggctgcccctagatcccttctgtagcctgctctgggacccacccctcccttacctgcagcctggcaggaaggtacacacagctcaggccctgacatatatctggactcaagtctgcctcggaaaggacaggaaagttccggtaaaggaggaggaccagcatgttggggccgtccaaggccattcggggccagccaaggggcaggctacattctggagctctttgtaagaaaatcctcactaactgatcccactaattcagaatccctgtcagtttcgatgttggcaatgctaaagttgcttttatactaaccatgaaataaagagtttcttaagcaaatgaacagaggaaataatattgacttccggcggtctccccagccacatagcggatacactgtcctgtgtgttttgagtgcctctgcaaacagatgctgctaattgcacatgacttttcttttcaccaaagatgctttgcagactctgctgaaaagcctgcggaagagtttatacgaggaagtactggtaagaactcttgtggttttcagcctcttctaccctctcccccaggagtgaggctgtgaggagtcctccccattgcacctcccatccccttgcctagcaggggtggggaggaaagtgtttagaacctgggggaggagagttttccccagacagggttcagtggctggggattcctaaatagtgaggaatcaaactcccctcctcacactgccccaggcagggagcagtcaaacctgggcacaaggacagtgacgccacccattctgtatgatcaggtgggcttggtcaataggattatccatggtgatcatagggtctgcagaccagatggctcttcctgaacttctgtttcctttaagccatgatcatttggggtttactattacctgcagctcaacctaatccaaacaaattccctgcttgccggattgaatgtgagacccaaagtcatctgaccccttagccacataaaagccatttctccccaggagcagaggctgtggcccattttaaaccccaatgagggccatggatactgtcccagaaaaacgcatggatgtgaacatgttccacttgcatttcaatactccacatacaggccttacacggtggctcacatctgtaatccagtgctttgggaggccaaagccagagcatggcttgagcgtaagaattcaataccaccctattttattatttgtctttacaaataataaataaataaataaataaataaataaataaataaataagctgggcatggtggtacacatctatagtctcagctactcaggaggctgaggcaggaggatcgcttaagcccagaaagttgaggttgcagtgagctatgattgtgctactgcacttcggcctgagcgacagagcaagaccctgtctataaaaaaaaaaaaaaaaaaaaggccaggtgcaacggctcacgcctgtaatcccggcactttgggaggccaaggtgggcggatcacctgaggtcagagttcaggaccagcctggccaacatggtgaaaccccgtctctgctaaaaaatacaaaaattagtcaggcgtggtggcgggcacctataatcacagctactccggaggctgaggcaggagaattgcttgaacccaggaggtggaggttgcagtgagccgagattgcgccattgcactccagcctgggcaacaagagtgaaactccatctcaaaaaaaaaaaaaaaaaaaaaaaaaatccgtatacaattttaagattcccagacttcctgaattttatgcttgttcccgtaagctaaaaacctctgacaaaaagggatgcaatttccaaaacactcaactcccaaactcaagtggtgtcagacccctgttctcacctagagtcacaatagagcagaggacaaggtctatgctatgtccattcccttcagcggtgccctaaccccagcaactaggtccactttcttgtagttactcattttctaaaaatgttagtgcctgcccactgggctcactgctgggggccatagagagcccccaaggaattcacacctagctggggaggacaataagttctatgttaagagtatcagcatttgttctcgccaccactagaaagaaaagaagaagaagaaaaaagtatcagcgaagtgccggggggaagaagaggaagccgtgaattccactgcatggcggagtggttacttgcacagcatctgacctgggccgctggagagggagaatggtgccaagcagtaaaaaagattggagtaagaggcgttttatacaaggggactgtgtcataccgatgtggacagcccttagcatgttcagggaacccaggggacacagaccagagctccccaggcagagggcggtgagcggagggagggtttggaaatgcgcctgcgtggttgactgcacccagctgtgcccggccttgaatgccacactgaggattttgacctgacctgtgggcagcaaggagtcagagagtgatgtgatcggatctgatggtgacaaggaggaacaggagacagagggaaggaggacgaggctgggagctgctggcagtgtctgggggtcaggtgctggctttcacctggcaggtagacccaacacctcagcacacagcacctggagtcagactccaaccgctcccaccaccgagatttcctcctgatcctgcagagcagacatagcctccctgctctttcaggtgggttgtgcttccccgcccccttcacccctcatctctctggtttgctctaaaggggcttctcattccagaatcacagaggagcctcagaggcagatgctaccggggatctgaccccctctaattcaccctcattccacagcttgatcaggcacacgtttcctgagactctgcctggaagaagcccttgagggaggtgcagatgaaacagacacatccctgccccgacagtgggctcagtaatgtacatgggatgcaggatagggaaggaaataaggcacagacaccaagaacagtcccaagaagcagcctggggagtttgcacaccccactctgtgggtgtttgggggagctgaggaggaaaagattcccctgggtggaatgggagtgggtcagtctaagaaaggctcagtggtggactccaggatttaaatggagaagatctggacttgaattcttcctttcatagctgtgtgaccaaggataagtcactctacctctctgaacatttgtgtcctcatttagaaagggacaaatgtacaaactcacaatgtttggggaagatccaagacactgtccagcttagtgcatgggaaagaggattataatcagtgtggtaggcagacgctagcatggcccccagagagcctctacggtggctgcctggtatccacacccaggtgcaatccagtccctgagcgtagactggatctgtgacttggttctagccagcggaatgtggcaaaaaagataggatgttacatctaaaattaagctataaaaagaccctggtttgcgtcttcctcgccctctgcttttgtctcgcttgcctgctctgatggaagccagctgccatatcatggggaagtttaccaggcaaggagccaaagaaggcctccttggggaactgaatcctgaattctgaatcctgaatcctgccaaaccacatgaaagctctgaagccggtcccaaccctccccacctgccaccccatcacgggggtaactgtgaccctggctaacactttttttcttttttttgagacagagtttcactctttcacccagtgaaatcgtgagtgagtggtgtgaggagtgaggtggtgcgatctcagctcactgcaagctccgcccctcgggttcaagcgattctcctgcctcagcctcccaagtagctgggattataggtacccatcaccacacccagctaacttttgtatttttagtaaggatggggtttcgacatattggccaggctggtctcaaactcctgacctcaggagatcccctgccttggcctcccaaagaactgagattatgggcgtgagccaccgtgcctggccgctggctaacacttcagtcgcagcctgtgaaagaccttgaatgagaggtcctggctgaattgtgctttgcttcctgatccataaaaactctgagataatatgttgcagttttaagccactaaattctggagcaatttgttatacagctgtagctaactaatgcaaccaggtgatacggagatgatttaacaactggctcaacacaggcgtttaccaaccagtcagagcagatgctgcctgcagccatggagccaggtcctggagcccaggctgtaatacttgatagaggactgggagcgcagggggctaaggggagggcaggaggggtcgtgggaggtacgagggggctcaaatcagcagcaatttgccaacaagaatgcaagtatttcaatattttgacaactgatacaactgtagtggggtgcactgactctcagcccaggatctaatatctagggttggaaatgggccttaaaggataaggtgatatccacagggccccatggcatggagcaagggaagccacacattggagctgaaggaagagttttctgctgtcgccgcttgtgtgcagtttcaaagactgctccatacacatatggcaaagacaggaaaacagctctactagcttaaaaacagttcctcgtgtagcagcaacataacagaggcactgaaatatcagaaacgcgcagaagagttcaaggccgtgtttgagaaagggaaggagggagggacattcacacgtatcacgtatcgagtaggtgcctgctgtctgacagacaccctgcccggctttatatccaagtctaggccactggggcacaaaggcctcatgaggagccatgtggtatgggtggcaatgagccacagcatccaggacagttttgtggaagaaaggagacagagggcacggggccctaaaaagggagacggagaagaagggaagggagggtgaggtgcgagccccacacttctgtggcaggctaggcctggggtacagccaccagccaacgggcccatggatcaagactataacccacccaaatgctgaccagggaggagggattccttatttgccgcttagcagtgggcgctttgccctcaagccaccagagccatttgctcccagaaccataagccgggaccaccctagttatgctgagagctgaattagtcccaagtagaagcagcaaaaacttgaccacaaaactcctttctagtagcatatgcaaatcagatgcccctccactccgatgccctgccctctgccatctccctcgatatcatgcagtgttgcgtgggaagggtgtctagcggctggccctaccgagaggtggtatgcttcggggagcaagtctatgcctgcttaccagctgggaatgctgcaggcaggcagatattgggaagaaagaatagaaagggaggttgtaggaaggtggaggaagaagaagctggtgaatttctgaagaggggaaagaactcctggcctgttgggaattaaccaggccccattcaccagccccttgacccttgagtgccacccaccccacccacagatctgcccagatgaaggtgtggactggggcgagatgcttggtgggtgctaaccagcctttactgggcaccccgcccaagccaggcacagtgcctggtgctctgtgcatggatatctcagctaatcctcaccacagcccttgaggtagctcgaggcaactcattagatggtgacagctacagcccagaccttgccttgggacacacggcaagcgaaagagtaggtgacaggcatgcccacctatgaggagggtaaagtgccagagtctccgtggaacccactttggccacagctatcaaaattgtaaatgcccctgccctttgacccaatgattggaccactgagaatatagcgtacggaaatactcacacgggggcatgaaagtacctactgtattatttgttatagcccaagatttaaaacaactgaaaagtctacccccaggggacaggttaaattaaggtccatccatggaatggactatcaggcagccattaaagagaagaatgaggcagctcactgtgtgctgagacagaacagtgggcaggatgtactctgttcaagtgcagaaacactgacatcgtatgctatcaaatacacacacacacacacacacacacacacacacacactcactcacctgaaggcttgcagctctggagataacccagaacactggtttcccctccctttgcctccagggaggagagctgagagatggcgaactgagagacagggttcaggggcaggtgaaaaacctaatctctgtacatccttttatatcttttgcattttagaccagatacacttattcatgaaaaaatataactttataaatgaagataaagaaatgcattagtactttgggaggccaaggagggtggatcacaaggtcaggagattgagaccatcctggctaacatggtgaaaccccatctctactaaaaatacaaaaattagccaggcgtggtggcaggtgcctctagtcccagctactcaggaggctgaggcaggagaatggcgtgaacccgggaggtggagcttgcagtgagctgagatctcatcactgcactccagcctgggcgacacagcgagactccgtctcaaaaaaaaaaaaaagacatgcattactaaataagctgggctcagtgacccaggccagtaatcccagcacattgggcactgggaggcttgcaggggaggttaagttgagcccaggagtttgagaccaccccaggcaacatgggaaaaccctgtccatctctccaaaaaaaaatttaaaaattagttgggcatggtggcatgtgcctgtggccccagcttcttgggaggctgaggtgggaggatggcttgagcccaagtgtttgaggccgcaatgaactatgatggggacactgcgctccagcctgagaccctgtctctaataataataataataatgaatagtaattcatggctgggcgcggtggctgactcctgtaatcccagcactttgggagaccgaggcaggcagatcacctgaggtcaggagtttgagaccagcctggacaacatggtgaaaccctgtctttactaaaaatacaaaaatcagccaggcgtggtggccggcgcctgtaatcccagctactcaggaggctgaggcaggagaatcactcgaacccgggaggcaaaggttgcagtgagccaagatcgtgccactgcactccagcctgggcaacagagcgagactctgtctcaaaaaaaaaaaaaaaaagaatagtaattcatggaaatggcaaaaatctcaaagagggatgtgcaaacaagtaaaggtagggaaactctgcgccactatagcatgtgactttttgtccctagtcacaaaagctgcatgaaagtgtgaaagtgctgtggcggcatctgacctgcgacaccagcatgaggacactgcttgttcctagtcctgcactgttcgctacagaacaaggtgtcctgctggattataaaatgctgagttttaaagtctactgtagtgagatattcttataccggactcacagacctgatgtgccagacattaggcccaacactttacatacactatcgcctgcgtgtttgcagcagctgtaggggcaaagtatcactcttatccctattttacagataaagaaataaacgcagagaggttgagtgactcaccagaggtcagatgcttgtggaaagtgtggactccagctcaggcttccagttccagagctgagcccctaacactccactgaactttgcatatagaaggtactgggtaaggccttttaactaagccctggtcctttccttcagattaaaaaaaaaatagattaaaggccccattgttccccaacccttaacatttctgttaaagacagaggtttggggtggggcatgggggctgacgtctgtaatcccagcactttgggatgccaagatgggaggatcgtgtgagttcaggagtttgagacaagcctgggaaacatagcaaggccctgtctctacaaaaaataacaaaattagccaggcatggtggcatgtgcctgtggtcccagctactcgggaggctgaggtgggaggatcacttgaacctgggaggtggaggctgcagtgggtagaaattgcactactgcattcatcctgaatgacagagcaagactttgtttaaaaaaaaaaaggctgtgctcagatactgaatgcctcaagggcagatgcccttcctcttcactgtatctcaacagtgcctggaacatagtggcccagtgtgtaagcaggaactcagaacacgtgtactgatggaaccgaacagaaataggcaatgatgcctcccccgggaagccctgatttcacagaacggcggtaccttgcccttctacaggaaggtgacttgggggctcccaagcgtgtccttccgtccagcctggcatggcaagagtggagttgagaatgcccccaggccccatcaaagcccaggtggggtgggaagggcagacaaaggctcctccccagacctcccggggtcctacatggcagaacttgtgcatacggctcagcagaagaggtcaggttaaaaagtctctgagacaagggtctagaaggagcggcagtgcatgggatgcctgccgcgctccccaggagtacaaatccaagaccctcgtgagcacgcaatgggggtcgggagcaggggagaaagagctatgacctcctaaaatgtcagcactggaggagggcctgggagggagaagcactccttcagctactatcccattttgtagatgaggcaactgaggctagagagatgatgtggtttgctgaaggacagggaggtaacagcatggccgaggctggattcctgtctcctggcatcctatgatgctccctttatcacctggagtgggaaggccacaatggttgtattctgggaggactcaaaccccttactagggcatctttggaggttttctacatagaacaggggctgagtggaagggctgtggctccctttcaccttaacaaccagagcagtgcctcccattggagattttgctggagaaaatggtccctctgctataacaaagaaaagctggaagtcactgggcatcctttcctgcctggtttccctctcaactctctgccccttgtctactccctgccactgccatccccccagcagctcaggttcagtctgagcggagtcctacccccatcaaggcctctgcggggtccctgaagactcacctggcacatccggggatggattgagaatcatgaaggcatccgataggccggttttgacaggatgctgggaggagctgatttccgggacagacatagggatctgcggcagggagaagagactccgtccacctcccaaacgctctggggcccacccagccctcccctgtgagctccagacccatctttctggatggcaccacctcctggaggactccaagacattggaagcccagtgggaccccacccaaattccaagtcctctccacaccacctccaagcacattttcttctttcctctgtctcggtgaatggcactccatgcaggccggaaacccgggacatacccttttcccttccctttctttcatttcttcccttccccatctaatgcatctccgaattctgttgcttaacctgctaagtggctctcaaatctgtctgttttccatttcccctcatcctactctaagctgctgtcacccttctcctaaattacttcccagtattccctctaagcccccaacaacctgttctccactctgaagccagagtgacttttctcaagggcaaatctgtggttcccttgccctgtcctgcccctcactctctcccttccaaccatgctgccttcttctattttttttttaatagaggtgtgtgtctcactatgttctccagactggtcttgaacttctgggttaaagcaatcttcccgcctcagtctcccaaagcgctggggttatgagccaccaccctggctcatcatgctgccttcttttttcttttttctttttctttctttttttttttttttgagacagattctcactctgttgcccaggctggagtgcagtggcacgatctcagctcactgcaacctccaactcctgggttcaagcgattctcctgcctcagcctcctgagtagctgagattacaggtgcctgccaccacgtccggctaaattttttgtatttttagtagagatggggtttcatcatgttggccaggctggtctcgaactcctgagctctgatgatccacccacctcagcctcccaaagtgctgggtttgcaggtgtgagccaccgcacctggcccatgctgccttctttcagtgctttgtgccagccgtgctctgtcctgcctcaggacttttgcatgtgctgtgtgctgttgtctctcctagaacatacttcactctcctctttgcttcctgaactcgtatttatccttcagatttcaactcttttcctcagcaaagcctcccctggcctctgccaaggttaagaggtctgtgaaaggctcagctagcaccaggcacctctacttgggagcgcttgtcacagtggtgattctacatttgtccctgtaattattgtccacctccgcaaccagacttactgctccaaaagggtaggacccgcaaacatcttgttaactgctgtattaccagcagcaagccccatgcctggcacattgcaaattctctaaatatttgctgaatgaagaaaggctccaagacccagctgtctctgcagctgggcccactcacctctttataggcaaagacaatgcggccgtcatggtgcagagctgcctggaaggtgaaactgcccttgtcttcccagccttggagataaacgtggtcccactgaaccacaaagactgtccctggggagaagaacagagacccggctggacgggagatcatgcaaggagcagggccctacagaaatgccagtcggagggcagcggccacaggttgggtcccttcgggatgatggggaagtttgcaaaggtaaggaggcaggagctgggcagctcactaaagcagcgcggcttccaagcagcagaggagccagaagatcctgcttcagccccagatactgtacttgatcatctctttccctttccttcttgtctattctgactccttgagataaaagaaggaggaatgtctgttctcctggattcagacggggctcaagggacatcctggtgaatgtaagtaacaataaaggcccctaacatttattttacctcgactaagagccaagcactgtcgttttgttatctcatcagattcttctgggtagcaggcatttttgcccctatctgacaggtcaggaaactgagcagagaaaggtaggtggctgctttgccgtgggactgtgggacccttgccctctctaggccctgtgctcctctaaaggactggacaagggatccctggagctgggtgacttaaattctgagatccagtctcaccattgtcaaagtaaacaactgtggagttgtcggagtagccagggttgaagttggccatcaggggcgccacatactgagtagctgtgagcatccgatggatcacgtcccccatgaagatgaagcctagggtgggagaggtgcagaggagtcaccagaaatggcccagaggggccgctttgggggccttttccccaagggcaagaagggcagcgcaggcagagctggaagtgagcctgagacctctgtcgcccatccccatctggcgggctctgggtctggtgtgtatggagccaaaggaccccagataggagaaggtcctccctgtcccttcagcagggcacagactatagggcgagggggcaggaagaggagaggactcacagctttccccatccctggggaagtgggatgtggaactgaagtgcagggattaaagacaggtgcctcctatcaacagggagcctggccccaggagcccaagctctcagtggagtctccctctccctcttattcagcaactccgggacacagggctgtccacactgactcgtgctggcccgaggagacacacacgtgcaggcacatgagcaggtcagctaatgcaagggagatgctctgacgtccactgacccccctcctgagaatcagactcctattagagccaaatgtgccttcctcccatttcatataaccctgtctccagtgagccacccctgggagggcccctgagttcgggctgaggtctccagactctccccggggccccacgacgtggccttacctccagttgctatggtgatctgccgcagaggatgcccgtagaaagggaaatcaaaggacaagaccactctctgcaggggatgggagaaagtcagcacgggccaagctgcaggccaggggcctgggcacccacactgcctcatgcttgtttggacagagtggggagcaggcatgcccagggccactgctgggcaccccaactctggcaaagtcccatgggaacccctggaaggtacctcccaggtcacagacctcgggccacagccatgcccactgaccaggcagggtggtttggcccccggcctcccagcacagggaagcatggctggcgactggggcactcaccgaagcctgccggtgggtgttggagagtattgtgtggatcttcacttggctccggttggcctcggccacatctacccacagttcccggctgtggggctcgctggggccatagagacgggacacataatagctgtggttgtcctcctgccggcacccaagataaagcccacaggaggtgtgagtagtcagcatgccaggactgactctccgcccttccccactcagatttctgggtacaggaagtcaccaccctcccagggtgctggacctgtggccccaagggctgatttaggcctaggaccccctggactcccccttggccccagacagctcactagctggcccctagtggtgccccaacaggcctggccacagccaaatccacgcctgctgccctcatgctcagccctcctgttcccagacaagccaggaggccggcagcccctgcatcccttcagaccaggaccaaggctgagcttggcatggggcataagggaggaacagacaggatggcctcaaaccgggcccttgttttcagggagctcccaggccgagggagagtcatagtccctgccctggaagagtaccctatttaatggaaaaggaaaatctgggctggacgcggtggctcgcgcctgtaatcccagcactttgggaggccgaggcgggcggatcacgggaggtcaggagttcgagaccagcctggacaaaacagcgaaacctcgtctttactaaatatacaaaaattagtgtggcctggtggcacacgcctgtaatcccagctacttgggaggctgaggcacaagaatcacttgaactcgggagccgagatcgcgccactgcactccagcctgggcgacagagcgagactctgtctcaaaagaaggagaaaaatctggatcttagaaggcaccagtctaaaggaggaggctgcctcttggtcctggggagtttccagtctggaatgggacttatataaacagaggagcagacacagaccctcaagcagagctaatacagaacccagagtccacacagcatcaccagggtggtgggaaggggagagaagcagcaaggattccttcgaggcatatctttgagcctttgctgtgtgcctgatggagatgaaataaagaagttagaatgctatgggctgggggttcattctgcaaaggctctcctgcagaggagcacttgggccagggttcaaaggaggccagggaaatggttggcagaaagacttaagagccagagaggggcgatgtggaagcccttcctggagccgacccaagagcaccagccgcaggaggaatggaggcagggcaggcaggttcccttggcagccaccgccacagaggtggggccgctgacctgtgaggagccctgggtcattaatcaggctgcccagcggtggtggcggcagacacagcagagtaaacgacattctccctgccaggctgccagctgcccagccggcccttgccctgggcgcagcgtgagcagggacaaggggttcctgcactcctcacctgccagaaggcactctgctcttacgataagcgacacaatctggagacctggggttggggcaggctgggggacgatgagcggaagaagcatggttggttggtgtcgggggctattccctctgccactgccctcccttcctgcctccagacagcccatgcctccacccatcctcagcacggcagtcaaaccaatcaaaaacaccttgctctgttcacaggctatccagggctccctgaagacactgtcctcgagacgaaaaccaaagctcttaggctggcatgcaagatcccaccatcagccagccccagcctctctctagctccttctctctcctctcaccaccttgtgcatccttgtgtgcccaccccccagaccagactcccctgacagcctcaagccaccaatggtcactcgtgccactgcccacgctggtcctcctgtctggaatggccaccctcgccttctccccttgacagattcctggtcattcaacactcggcttaaactctgccttcttttattgttgagacagagtctcgttctgtcgcccaagctggagtgccatggcatggcctcggctcactgcaacctccgtctcccgggttcaagcgattctcgtgccttagcctcccaagtagctgggattacaggcacacgcctccacgcccagcaaatttttgtatttttagtggagacggggttttaccatgttggccaggctggtctcaaactcctgacctcaagtgatccacccacctgggcctcccaaggtgctgggattacaggtgtgagccactgcgcctagccaaaccctgccttcttatcagcctttcacccctacctccccaatgaggacctccaccccctgcaagtggcctccaccatcccttatttcagggagtcctcaaggggtgactcatgtgtactatttgcaagagttacatggggccactcttgttggattcttggttttactcacaaagccacctggtaggggggctgccctgatgccacggcccctggggtgagggctaaggatgctgcttcccattgctgccacagccaccagccctggagtctcgggagggtacccagagggggacgcactgctctccagctctgcccacaggcactgaagccactgcttctgcccagagctcttagcctccctcgggaaagcagctccctctgtttctgcccctttccccatcctccaggagaactaatgcttcatgtttttccttggtgtctgtctctcctatttccacccatctctgctggagacccctatctcaatttttaaaaaaatcacccatcaagaaacaaagctccgtgcgtggcactctgtgcagagagatctgcacaaaggaagagtccgatggccgcctcccagcctgcttcctggattcacaggtgagcagtttttattccacttccaagcaaaaaaaatatagggggccctgcccaacactgtacatctgatagtctgtaggactccaactctgaagctggttatggttcacctgggaccacctgccacggccgtagctacagcctgccctcttccccccagttcaaacaaaaaagtggcttattaagagacatcagttagcctaaaattttgcctgaagaaaggaaaccaagtttagatgctattcagcccatctttttttttctttcttttttttttttttttttgagacggagtcttgctctgtcgcccaggctggagtgcagtggtgcgatctcagctcactgcaatctctacctcctgggttcaggcaattattatgcctcagcctcccaagtaactgggattacaggtgtgcgccaccatgcccagcccagcccatcatttaaatgtttgtttgcccctgaactacgagcccctgacacgcagggatgggcaaggtcacctctgtgcctatggctcaaggtccctcacttcctccatgcttaggaagtgtttgctggaggtgggggtagggggactggtgctttgcaatgtgttaaaattagggaaataaacctgcctccctaaatcctgggctatcttatgatctgtgggtgaggggaaaacgagtggcccaccttagcccagccagcaccagatagcctttccatccttttgcatgctgtagtgagtttcaactgtgttacccaaaacgatatgttcaagtgtgaacctctggtacctatgaatgtgactttatttggaaatagtctttgcagatgaaacaagtcaagatgaaggcagaccggattagggtgggccctaaatccaatgaccggtgtctttatgtaaacgaagagggagatgtggatacagagtcgcagaggagacacagggaggatccctgtcacaatgaaggcagagattagagtgacgctgtttacaaaccaaggacaccaaggatttccaggagatccagaagctaggacaagacaaggaaggctcctttcccagggccttgagagggagcgtggccctgctgacaccttaatttcagacttctggcctccagaactgcaagtgaataaatttctgttgttttcagctaccaaaattgtggtaatttgttctggcagccctaggaaatgaatatctgtgccacaggtgtgtgttactgtggcccagttgggacaacctgaaattgttttccctgttccacatcatccccttgcttaggccattctgtggctccccagttgcactcagaacaaaggttacgccccttccgccattcccttctcttctttactaatagaaaattgattttggattgagcacagtggttcatgcctgtaatcctagcactttgagaggacgaggctggaggatcacttgaggccaggagttcaagaccagcctgggcaacatagtgagaccctgtctctacaaaaaatacaataaaataaaacaattcactgggtatggtggtgcatgcctgtagtcccagcaactcaggaggctgaggcaggaggatcccttaagcccaggaggtcgaggctgcagggagctgtgattgagccactgcactcagcctgagtgacacagtgagactctgtctcaaaaaaaaaaaaagattgattctgtagcaaccagcaatgatgtagccatctaataaacctcattccctggatgtcttaaggattaccatgtgacacaggctggctcatgacatcagctgaaggttctagtggaaccttctgaaagagatcaaatttgactgcttgtccctcttatctttgcccttcttcttcctgcctggaatgcagacatgatggctggagttccaacagccatcttgtgagtataaggacaagagccacaccctaaggatggtgaagtggacaactagatggagacttggtccctgatgacatgctagagggctgcttcttaagtccctgggtttagctctctgttaaacggaaacacaaatccttccccacgtgtggtggtctggccccaactcagcacctcctcctctcccctgctctcttgttctgggaatcaccacacagttgtctgcctcaggaccttggtgccgcctgtgcctcaaaatttcttcccttccctgttcaggagctgacccttcctcacctatccagcctcagctcaggagtcacttcctcaagaaagcctctctgattccctgttgcattcccatcacaccctgtgcttctttctcctggtgttttgcacacttgtgacaatttacttggattttatacacatcttcatgtctgcctttcctgtaagatcgtaagaccccaagagtaaggtcagcctttatttatcgtgtttaagcacagagtatgtgttcaatggaggatttgttgagcaaagaatgaccacaaattatagctgcctgttttacaggtaccactacatattctgaagtccaggataggatcattttaccaaacaaagcaggacagctgcagatgctaaacaggtgctctcaggtaagtctcagagtcaactgaatacagcttccacctgggaacctgagcgggccagtgtttaagacggttgctttgaggctcggagaaaggtctggtttcaatcagcctgcttcctgggccccgcacagcgagagctttccccaaacctccgggcgtctgaaatgagtgcccgggacagaagccacgctctgcagttgtgaagcccaaacagatgctgacgtgtctcttgccgcctcagctaagactgcaaagcgtgagcttcctgggaatgcatcttcctggcccgttgctcggagttctctgcttcacagcaaagacaagcagtctgatccaaactagtgctgttctgcagagaaaccaggccctgtgtcacgtgcctcagctctgacacctggatgatccctggactcattcttggagttcccgatgacccctgcaatggcacctcttaactgacagaaaacttccatctattctgactcaaggaaagtcagaaatgaaacgagctgctgcctctaactcctaagctgattctctccaatgagtcagcagatcccagggaaggcaagagcctcgaagcctaacgatgccctactcaggccagcgagggtgaggccaagctctgcttcaggcctcagaagtgccaagtacagctggcctgccagggggaggactggctcaagggcaatgccatgcagaatctgctgcaggtcccaaacaggcccaacagactgccctcctggcacacctgacttttattactccaggacagtgaagccaggagccatatctactcagctctggctgagggtggccacacagtgatgggtgaggccaaattgcaccctggagggagggggcgacttgcagggggatcactcctgggcagagccaagcacaaagcctgcaggggagcatttgggagcgtgggaggaaggagaagggaagctggcatttgctgagtggtgatgggagagtgctgggcatttcatatttgttactgcagggcaaccctaggaggtgagcactaatattagtcccattttctcagtggggaaactgagactagaaatcatgtaactaggccaggcatggtggctcatgcctgtaatcccagcactttgggaggctgagacagggcggatcacctgatgtccggagttcaagaccagcctggccaacatggtgaaacccatctctactaaaaatacaaaaattagctgggtgtggtggcgcatgcctgtaatcccagctactggggaggctgaggcagtatattcaattgcttgaatccaggagtggaggttgctgtgagccgagattgcgccactgcactccagcctgggtgacacagtgagactccgtctcaaaaaaacaaaaaataaaaagaaataatgtaactgtatgaaaccaggtcagttccactcaaagacagtgacctttcctctatccactgtctctgagatctttaagcaacagctctccgggaaggtgacttaggctacctaccagtcattggttaaactctcaatcagaaggaccactgtctggaggctggagctcagggatggtggcacattcatctccgcccccagcacctccctagcgcaggggttggcacctggcatctggtgggtgttcagcatctgcttgccaaatgagctgaatcacaaggattctgcagccaatggtgtcaagactgtgctgagaatgtgcagtgtggctctgacaaggacagcatcctcccccatctccagtggcaggtgacacaaaagccacttgtggaggaaccagctgcctcctctgggaatccaagcccacagacagcattcccaaacctgggacatcctggacacaggaaggtgtctctggattcctcaatttcttctctgaggaagtaaagccaacaaggcagataccttcgggggcaaggaagagaaacccagcttcaacacggaggacatgtgttagaccaagcgtctgagagcctggcagcaggcatggaacatggatgatcctcgtgtcatcaggacattgtcctaagtgtgactgcctcctggtccaaagagggctgcctatagccactgaggcagcatgcttccttgtcgggttcaaaaggagaaacctcgcaccaagagtggaacacaagatcttcccttcagtctgatgtggcccccgattattacaagggccagggcgtgccagattggttaaaccagtctacttcccccaggaactggggatcatggctccgctaggaatggggaatggaagctgggtgagcaaaggcctgacatcagggttgacggggaatgtggctcaatgaccaagaccaagctctttcagtctttcttctctgccactttcagtgtgggcttcattgtaaggctaggcatcttgtagtgacgggatggcagacagtggcaactagccctggctcatggaagcaagacaggcacagcacacctctccccgaccactgaatgaacacgtgtgcttcaagatggcagggtcaacctgggtcccctgccacctctggactaggaagccctagatgctaaacagcttccacctaaaccaaacaccagctggggggtaggattatcatggaacccaagatcccattcctattgtacaaggctgtaaggtaaaatatatgttgaaaagtcaaccgcaatgtccacttgccatctgaatccaaccaatgaaccagtactctcaaaagacaagaagcactttgggaggctgaggcagaaacatcgcttgaatccaggagttcaagaccagcttgggcaacatagtgagaccctccccccaagtctacaaaaaaaaaaatgcaaaaattagctgggcatggtggcatgcacctgtagtcccagctacttgtgaggctggggcaggaggattgcctgatcccaagggatcaaagctgcagtaagccatgatcatgccactgcattccagcctgggcaacagagcaagacattgtcacaaaacaaaaccaagagacatgccttttactttctggaagcagagctgagtaaagggtttgattggccagcatcctccaatctgtccacatgcccagggaggtgcaacagttctgccaaccactcaggccttgtggaatgaaaaagaagagacttcagctggggcagggctgctccattgcctgtattgattgtctccatccagttctttatgaggccagagtttacccaggttcctcagggctgagcatcagtgatgcaatgaaagctattgccacctacccgcggcgttctagagccagtccttttagtctagaattccttccctccctccctccctccctcccttccttccttccttccttccttcctctctctctctcaatctcttccttccttcctctcaatctcttccttcctttctctttctttctttctctctctgtctgtctgtctctctctcttttcttttcttcttttttgagatggagtttcgttcttgtcgcccaggctggagtgcaatggtgagatctgggctactgcaacctctgcttcctgggatcaagcgattctcctgcctcaccctccagagtctctgggattacaggtgcataccaccacacccagctaattttgtatttttaatagagacaggggttttaccatgttggccaggctgttcttgaactcctgacctcaggtgatccacccaccttggtctcccaaagtgctgggattacaagcatgagccaccatgtccgcctagtctacaatttctgatgctcctgaaacatcaatgttgtatggagccctgctaactaaaatttcaggtgtgacattatattttaaataatatccttgtaccagacatgttttaggatgctccatccccatcccaatgacgtttgcccccagacccgtaggccctgctgagttgactacacccatcacagtctcctacatgaccctgtgcttcctcagactgattggacataggtaatcacatgattcaaaagcagctcatctattggaagcctacaatctacagcttgtgcagcctgagccaatcagatcaccacccgggagggtgaaattgggaaactgagaagctggcagcaagagagctgagttgaaagatcttggagacttaggaactgaaaccattcaagatgaacagagtctgtgagaaaaaaagaaaaaaaggaaccgaaaccatcctgagctgtctgcagaagacttctgatccacagaaaggaaaggcagaccttatatacatttggcttcaataaacatatgatgaattaatgaaaaggaggcaagaactgggggaggggacctggttcccaacagctttccagcttccttgaggtctggctgtccttcatgtccagcccttgggtctcccatgatcgtcttctgcaccctcacgataatccttctctgtgggacagctcaaatagctcctcagaaccaaaaggaccttaaatagaatagccttgcttatgaggtgatcagaggaaaaacctccagggtgagcccaggcagtccttcactggtacagacagcaagagtgtgaatgagcccaccacaaagcaagggtacgtgtttgagattatgaatgtgcaaattaccctgatctgatcactatacattatatgtattgaaacattactatgtaccccatgaatatgtacaattatttgtcaattaaaaaattaaattagatcgggcgtggaggctcaggcctgtaatgctggtactttgggagacccaggtgggtggatcacttgagctcacgagttcgagaccagcctgggcaacatgttgaaaccaccatctctacaaaaaataccaaaactggccaggggtgatggcgtgctcccatagtccgagctattcagagtctgaggcaggagaatcgtttgagcctgggaagttgaagctgcagtgagccaagatcgcaccactgcaccccagcctgggcgacagagtgagaccctgtctcaaaaaaaatttttttttaacttcatttttaaaaagaatatgaatgagaagagagaactgagaaactaaatttctgggagaacttttccctggcaacacatcagccactgtaaactaaaaataaaatcctaagtcccccaaccaactgaatggaccccctcttggccaatgagaccccagaaaagctgagttcccagccataatgggatgggagaccagacacacctcattgtaacccctcccttttgcagtttagacacaactaccagcattaatattaaaatagagatcagaagacagacagaatggactctgtggcaatatgatatcaaattataaagaggacctaaggccatgacaggcacgggttaaatcacgcacccctgcaggccactctgacccagcgcttttttgttttgttttttgagatggagtttcgctcatgtaacacaggctggagtgcaatggcaccacctcggctcacggcaacctctgcctcccaggttcaagcgactctcctgcctcagcctcccaagtagctgggattacaggcacccgccaccacgcccggctaaattttgtatttttagtagagaccgacctcaggtgatccaccctcctcgggctcccaaagtgctgggattacaggtgtgagccactgcgcctggcctgacccagcatattgagtcttgctctgacatatcacatgacatatcagataaggcatgagatgatgtgactctggcagatcatacgatacatggcatgatatgattggcagatcacatgatgattagcaaacttctttatcttaaacattcttttccactgactccaagttttctatttttatttattttaggttttttttttttttttgagacagggtctcactctcttgcctgatcatggctcactgcagcctcagtcctcgacctccagggctcaagtgatccttccgcctcagcctcttgagtagctgggatcacaggcatatgccaccacacccagctaattttttttttttttttttttttgagacagagttttgctcctgttgcccagggtggagtgcaatagcacaatctcggctccctgcaacctcccgggttcaagtgattgtcctgcctcagcctcccaagtatctgggattacaggcatgcgccatcacgcgcagctaattttgtataattttgtatttttagtagagacagggttgggattacaggcatgagccactgcacctggccaaacacccagctaatttttaaattttttgtagagtcaaggtttcaccatgttgcccagtctggtctcaaactcctggactcaagcgatcctctcacctcggcctcccaaagtgctgggattacaggcatgagccactgcacttggcctctactgactccaggtttttgaacaaagccttactcctttaaccaattgcaaattaaagaatctctgaacccacctatgacctgtgagctctcacttcaagatagctcaccttttttgggccaaagcaacatataaactccatatattaatttatgactttgccggtaacttctgcttccctaaaatgtataaagcagagttgtcacctgtctcaggatcacttactcaaggcttcttgggtttgtgttttctccaggctgcaatcgctcatagaggctcagaataaacctcctagtttgatttctctgccaacaccactgtgattcttcttctctaaagtcaatcactgctagcttcttggctggccattgggaaaaagagtcccatggcttgaaattcaccaactttggggatacttcccaactgccaccataggccccttatcacgctgccacccacatgggcagttttgatggaggaaccccacccatggcaaagactaataactgcctcccaataaccactctctccttcttccttgagttgcagaggctcccagttatagctaggcacacagtcacacagttaaaccatatttcccagccctccttatggctaggtatggctacatgactatgtctggccaatggaagatgagcagaaagattgcccgtaataagaatgggtgaccgggtccggaggctcacccctttgggaggctgaggccggcagatcacttgaggccaggagttcgagaccagcctggccaacatggcgaaaccccatctctactaaaaatacaaaaattatctatgtgtggtggtgggcgcctgtaatcccagctgctcgggaggttgacacaggagaatcacttgaacccaggaggtggaggttgtcgtgagctgagatcacgccactgcattctagcctggttgacagttcaagactctgtcaaaaaaaaaaaaaaaaaggggggggggactgggtgcagtgactcacgcctgaaatcccagcactttgggaggccgaggtaggcggatcacttgaagtcaggagtttgagaccagccgggccaacatgttgaaaccccgtctctactaaaaatatttaaaaattagccaggcgtggtgaggcacacctgtaatcccagctactcaggaggctgaggcaggagaatcacttcagccaaatcgcaccactgcactccagcctgggtgacagagcgagactctgtctcaaaaaaaaaaaaaaaaaaaaaaaaaagactggggtgccctctctctgcctggctgggatgcagatgtgatggtgggagctgaaatagccatcttgagctacaaaatggaaagcacatgttttagaaggcagagccgcaagatagcaggaacctaggcccccaacaccaggccagtctatcccagggtatggtcactataatccatattgatgtgcctcttaaaaaggatgcggagaccttgcctggcagtgaaccttcccaaggaattcacacaattcacagcccattgtagaagctctgaccaggatgacttgacattacaaaggagctcagtgagggttacacgagccacgccgcttggcaagtccaccaaatggaatgatgtttccttgaaatgtgtgcaagaagccctgatcaataatccacatttgttttgggaggcagtgtgatatggatttcaaacatttttggtcctgaaatcatttcttccaacaaatctttcatagaagctcaatacacaaatcacatcaaagtaaagccacattgggagaaggacagagaagggttggagcctagcttgctgtgctacttccttttctgccaccctcactcccacagcagcccgtgaagcgctcctcagaccctcggggttccatggagcacaattcgaaaaccattgctctaggatcaaacatattgtctgtggagtaagacagacccaagttccaaaatgggctccattatgtaatggttggtgtccagcattcctctcttctctgagggtcagttccctcatcagtgacctttcttgcaaggttcctctttttttgagacggagtttcactcctgttgcccaggctggagtgcaatagccgcatctcagctcactgcaaactccacctcctggattcaagtgattctactgcctcagcctcccaagtagctgggattacagatgtgagccaccacaccagctaatttttgtaattttagtagagacggggtttcaccatgttggccaggctggtctcgaactcctgaccttaggtgatccacccgcctcggcctcccaaagtgctgggattacaggcatgagccaccgcgcctggcctcttgcaaggttcttgaaaggggtttcttgaaaggattagacaaaacatatcaacacaaagctcttagcccagtgcctggcccacaggaggtatttgagaagtgggagctattaccctgatttgtttgggcctttccaggaaagggcttgattgtggaggctgcctcctcaaagcaacccccagctccatctgaaacgtcagcagttacagtatttcttccgcctcaattagtcatgcccagaggcccgacaggcacttcatttctgacagcggggcagcatttaccttggctgagctcaagacatttctggacaggaactctggctaagctgtcacagtcggcccatcacctgccagccaactggcaggaggaaatgctggggcaagcaaccaaggacgtcctgcagggctgctagagaggcttggctggccaggctggtcaggatggtgctgaggcagctgggtccaacccaggaggcgtggatgggattactgtggggagggggacatcccagtccctgcccttcgatcgcagggcacatataccaggaagccttacaaggccaacagaaatgcattctagatcctgcttttccaagagcacccctgggccgcaacatcagcatcactgggagcccgttagaaattcagattattgggcccaaccccaagcctgctgaatcggcatctgcctttggaagcacttccaaggggattttttgcaaagcacagtttcagaggtcctggtccagaagtaccttctgcatcaacacgtcactcatttttgtccctgaagagacggtgggtaagagctcagactgcctgggcactgtggctcacgcctgtaatcccaatactatgagaggcaaaggagggagggtcacttgaggccaggagttcaagaccagcctgggcaacatagggagcctccatctctacaaagaaagacaaaactagctgggtgtggtggagcacatctgtagtcccagctactagggaggctgaggtaggaggatcactggagcccaggaggtcaaggctgcagtgaactatgttcacgccactgtgttccagcctgggcaacagagcaagaccctatctcaaaaaagtttttaattaaattaagttaaattgtgagaaagagcttaggctctgaaggcaaagacctgggttcttgtcctggttttgccacttactggctgtgtgatcctgaataggcaacttcacctctctgttccagatagctaaagagagacatgcctgcctcatcaggtagttgtgtggattaaacataaagccatacaatgaggctggcactcaggaagggcttatttatttatttagagacagtctcactctgttacccaggctggagtgcagtggtgccacctcagcttactgcaacctccacctcccgggctcaagtgatcctcccacctcagcctcttgagtaactgggactacaggcacaggccactacgcccagctaactttttttgtaatttttatagagccagggtctcaccctatcagccaggctggtctcaaactcctgggctcaagcaatcctccctccctccgcctcccagagtgctgggattacaggcctgaagcgcaattccttttaatgtcccctgttattattttctctcacctcatgtatccatacaataacccccagctgccctctggacatagccaaacctcaggttgaaataaacccacacagaacatttgtcatcacagaaatgcaggaagtatgtcccctggtataaccctgcaaggggagatccaggctggacaaagagctctgcctcgctgagggtctggggtagagagatgtcagagtgagtgaggctgacctaagaaagccctggaaacagggctttggattaggcttgtacagaggatatggactggcattgggggtattaagcatttcttaatacccctaacagttcatggaaatggaaaaatcatcctatcctggcaatgacccaaatgtgggctttttgagggattgtgatagggtaaatatagaccatatagccacagagaattaggacaaggacagacaaaaacaaaaacaggccttccccatccctcatctggtcccatgctggcctattttcttctagtgtttttttatatgtatgttaatttcacagtcacagttctgctgatcatgcagtttcatggaccgcttctgtcacatttcatgatatcaaaagcagcttttgatggtaaacaaggtatttccaaacatcatttgtaacagctgcatgacagtccactcaggagaaaactcacaattttcttcactatttctcttttattgagcatttaggtagcttccaattttgatgcttttataaatactactgtgatgaacttgttgatacattttccatatcttggatgacttcctctgcttcgtagcctttggtataaagcaatgcttctcaaacatgagtgcacatgggccgggcgcggtggctcacacctgtaatcccagcactttgggaggctgaggcaggcggatcatctgaggtcaggagttcgagaccagcctggccaacatagtgaaaccctgtctctaataaaactataaaaattagccggatgtggtggcgcatgcctgtaatcctagctacttgggaggctgaggcaggagaatcgcttgaacccaggaggtggaggttgcaatgagccaagatcgcaccactgcactccagcctgggtgacaagagtgaaactccgtctcaaacaaacaaaaaaaaaccaacatacaaacaaaaaagagtgtgcatgtgaattacagtaaggcctcactcaacattgttgatgggttcttggaaactttgactgtaagcaaagcaacgtataatgaaaccaattttaccataaagtaattgatataagcaagagttaagttcctagggcatatttccagttgcttctaaataaagtcaaactactaaataaagaccaaaacacttctaatattaaacagacataaatgtgagttatgtaatacatacatttaaaaaagactcataaaaacaagttagaataattatttacacaattattccagttcagggtctctggtggctggaacctatcccagcggctcagggaacaaggcgggaactgactcagagcccattctatcacagggcgcactcacacatattcacgctcactcatcctgggacaacttagacactctagtgaacctaaagtgcacatctttgatatgtgggaggaaaccagagtacccggagacgtgaagagaacatgcaaactccacatcagtggtgcccccagctgggaatccatttatttttttctcatcaacactacaacaaaacaacggtgaccacaacgatgtcattggaggacctactgtacctgggaatcggattctgattctgcaggtctgaggactccgacattccacatttcccacgagctcccaggcactgccagtgctgccggtcccttcccacaccttgaagagtattaagaatatgaaagataacacctgaagcttcaaggccaggaaatcctcttttgtgactacaatcctatttttgtactttcaggtaagatctgggagggatctttctagttaactttctcaagcaatcagtgcatctgatttttagaacaaccctatgagaaatgatcagtcccaccttacagatgaggaaacaggtttagagttaaggcccagcaaggatacgcacggtctacctcatctgggacctgaggagggtgagcaactgccccagtttacatagaacttaggaatttccaggatgccagactctcagaactaaagccgggaccatcctgggaaacccgggatagttgatcccctagaccagagccgaattccaagtcagcttatgcttcccactcccactgtgtgctaggccctgaatggacattaccgcacaacacctttgcaataacacttcagacaatagcatccccattagacaatgaagaaatgggctcctcagtagaggggctaagaaactcgcccaagacaaaaagacaaacattctaattaaaaaattggcaagggggaagaaacggacaaatgacttgaatagatattcctccaaagaagatataaaaatagcccaaaaagacatgaaaagatgctcaataaggccgggtgcagtggctcatgcctgtaatcccagcactttgggatgccgaggcgggcggatcacgaggtcaagagattgagaccatcctggctaacacagtgaaaccccatctctactaaaaatacaaaaaattagccgggcatgatggtggcgggcgcctgtagtcccagctactcgggaggctgaggcaggagaatggcgtgaaccgaggaggtggagatcgcaccactgcactccagcctgggtgacagggtgagactccatctcacaaaaaaaaaaaaaaaaaaaaaaagatgctcaatatcagtattcattagggaaatgcaaatcaaaactacaatgaagtaccacttcatacccactaggacagctctctctctctctctctctctgtctctctctctctctctctctctctatgtgtatatatatatatatatgtatatatatatgtgtatatatatgtatatatatgtgtgtatatatatgtatatatatgtatatatatatgtgtgtatatatatgtatatatatgtgtgtgtgtatatatatatttttttgagacagagtttcactcttgttgcccaggctggaatgcagtggcgcgatctcggctcactgcaacctccacctcctgggttcaagcgattctcctgcctcagcctcctgagtaactaggattacaggcacaagccaccatgcccagctaatttttgtatttttttagtagagacggggtttcatcatgttggccagggtggtctcaaactcctgacctcagatgatccgcccacccaggcctcccaaagtgctgggattacaggcatgagccacagcacccagccctataattttttaaaaaagggaaaataacaagtgttggcgaggatgtagagaaatcggaaccctcatacattgctggtgggaatgtaaaatagttcagttgctgtggaaaacagtctggcagttcctcaaaaagttaaacacagagttaccatatgacccagcaattccacttctaggtatagatcccaaggaattcaaaacagatactcgccgggtgcagtggctcacgcctgtaatcccagcactttgggaggtcgaggtgggcagatcacgaggtcaggagatcgagaccagcctggctaacatggtgaaaccctgtctttactaaaagtatgaaaaattagctgagtgtggtggcacgcgcctgtagtgccagctactcgggaggctgaggcaggagaatggcttgaacctggtaggtggaggttgcagtgagccgagattgtgccactgcactccagtctaggcaacagagcaagactccatctcaaaagagagaaaaaaacagatactcatgccagatgcggtggtgcacgcctgtaatcccagcactttgggaggccaagacaggtggatcacttgaggccaagagttcaagaccggcctggtcaacatggcaaaatcccatccctactaaaaatacaaaaattagctgggcgtggtggcacacacctgtaatcccagctactcgggaggctgaggcacaagaattgcttgaacccaggagacagaggttgcagtgagccaagatcatgccattgcactccagcctgggcgacagagcgagactctgtctcaaaaaaaaaaaaaaaaagaggctgggcacagtggctcaaacctgtaatcccagcactttgggaggctgaggtgggtggatcacgaggtcaggagatcgagtccatcctggataacacggtgaaacaccgtctctcctaaaaatacaaaaattagccaggcatggtggcacgcgcctgtagtcccagctacttgggaggcttaggcaggagaatcgtttgaacccgggaggcggaggttgcagtgagctgagattgcgccactacactccagcctgggcgacagagcaagactctgtcagaaagaaagaaagaaaagaaagaaagagagagagagagagagaaagaaagaaagagagagagagggagaaagaaaagaaagaaagaaagaaagaaggaaagaaagaaagaaagaaaagaaagaaaggaaagaaaagcaagaaagaaagaaagagagaaagaaaaagaaagaaagagaaagaaagaaagaaagggaaagaaatttaagtacatttacacatgttcacagcagcactattcacaacagccaaaaggtagaaacagcctaaatgtctatcaataaataaacggataaacgaattatggtacattcatacgattaaatattatacagccataaaatggataaaccttgaaaatattatgctaagtgaaagaaaccagacataaaacatcacatattatatgattccatttatatgatatatccagaatgtgtaacttcatagaaataaaacacagattggtggttgccaggggttggggtggaggagtgaacagggagcaactgcttaatgggtaaagggttttcttttgggtaatgaaaatgttttggggccaggcacggtggctcatgcctgtaatcccagcatttagggaggccaaggcaggaggatcacttgcgtccaggagttcaagaccaccctgggcaacttagtgagatcttgtctctacaaaaaatttaaaaattagcctgttgtagtggcatatgcctatagtcccagttacttgggaggctgaggtgggaagatcccttgagcccaggaggtcgaggctgcagtgagccatgatcccaccactgcattccaacctgggcaacagagcaagaccctttctcaagaacaaaaacaaaacagaaaaggttttggaactggatggggggttggttgcacaacattgtgaatttattaaatgccactgaattgttcactttaaaatggtttattttattttactttattttatttttgagacagtcttgctctgtcgcccaggctggagtgcagtggcgtgatcccagctcactgcaacctccactctgggttcaaccaattctcctgcctcagcctcccaagcagctgggattacaagcatgccaccacgcccggctaattttgtattattttagtagagacggggtttcaccacgttggccgggttggtctcgaattcctgacctcaaatgatccacccaactcggcctcccaaagtgctgggattacaggcatgagccaccgcacccagcctaaaatggttaattttatattatgtgaatttcatctcaacaaaaaagaaaaaaagaaactaaccaatcaaccaacacaccaccctgcccaaggagaaaggaaaatggcctgcaagaggaaccggaccgggagaaaaccacctggggctgagtagccgggagcagtgttgtgacccgaagcggaggggagaccaccaggaccaagaaccatcatgggcctcatattctgctcttaaatcaactctgtgagattggtatttaccacccatttgggaaatgtgaagctagcaagggcttggaggggctctaaatgtcaggtttgttaactgaggggttaagtatccagcccaaggctatgcagctggtctgtgtcaggaccaagatcgagggccaggactgccgggctcctccacagcactggagacgacatctgcactccacctcctgcctccctggacatgctttcttctcacagaatctcttctctctttttcttttcttttttttttaggcgacagaatctcgctctgtcgcccaggctggagtgcagtggcatgatcttggctcactgcaacctccacctccaggttcaagcgattctcctgcctcagcttcccgagtaactaagattataggcgtgcaccaccatgcccagctaatttatgtatttttagtagagacggggtttcaccatgttagccaggctggtcttgaactcctgacctcaagtgatatgccctccttggcctcccaaagtgctgggattacaggcctgagccaccatgcccagacaacctttatcttctctctcttcaaaacttggctcctaactttcccctccctccacccaccccccaactctgctcccagaatcttccgggattggcctccttacctcgttcccttgagcaccctggtggggccaggttcttggaggagcactgcttgccccctgtggtttgtgcgaggagtctgactggcttcctgtctcccaaggccctgcgttctgaaaaccttctttcgggagctgcctcctttggaaggttgtagaaaccaggcaggtcttgcactctccctgccaactgtcttggatgatggggtccctgccctgacacagggtccctcgcattcctggggcctgctatggtgatgtacaagccaggaggttttgcttgagccagagaagagagaggaattcagggatgctgggccatgggggagattgggaggtaaggggggtgaaagggaggggcacctcctcaaatctaaatgttcttatgcttgatttcccccaaactctggctctaaacctgaaccatggaaccaagtaaacattggagtagaattttgaaatcctcaaaggaagagaacctttgccaagacctcccctttccagcctctttgagaataaattgtggcacatcccagggtctctgactcagcacatcccaggatctctgactcagcacatcccaggatctcttgactcagcactatggcttccccagttctcctgctcccgtccccgaaacgcccagtgtccccagggcctcagaattggtcttggtggaaaatctccggaaatcttgagtctggacaagagtcctgtttccactgtgatgtggtggtagattgggtgtgggaatgcattttagggaggagatggttctgaccagggtcctcggagctgccagctcaccctgggactgggagggcaggctagacgcctcgaggcctccaaagcaagaggttctgaattggaaggagcattgtggtgagatggcctggcggggggtgcctggcagaggcactgggcagagagggctgaatggaggcagctgggcagagggtctggatggaggagctgagtcaagggggctgagccagaggggaggtccgcagccaggagggttactgaggaacgatggaggaaggtgatggggcactggggtttgtgtagggggaggcaaaaggcatggcagcccacccgccagccctcagtcccttgatatggccccagagcagagggtcccagagcctggttgctgttggccaaacccagctgtgataccagatgaacagaggaagtgttcctgttgaaacccaagaaaactctgtgagacagaccaaatcaaacttgctgaaacagccccttcccgccactctcctcttatcttgcccaccctctgccgccaacccatcatctagatgagacttccttaggccacagtgatgctgagctgtcagaggcatgggagaaacaggtgactctggacacctgtgccggactcccagccagggccacccattctccaggttgggggtgggcagatagtgggaaagggcgtttgcggtctggctgctgggggtatcaccagcattctcaggtgaacaccacccagaacaaggcctaacaggacgagggcagggtagagtttgggtatggagccacctgagtctcgggcgtgtgcagacaccctggtgtgtgtaagcactgacattctctcatgtgtgtgggaatccaagttagcagagttggggtccttagaggctcctgtgtccagtgactcacaccagggacaatcacaccaggcagaactcttcccttctacaaccctgtttttggagactaggatgtcgaaaaccctacttcctttgttcattcaaaggagtgcttgtcatggaccaggcacagtcccggctctcctgtgcttacattccagggggaagataggcaacagacaccaatacatggatcattcttttctatttttttgaggctgggtcttgctctgtcacccaggctggagtgctgtggcgcgaccatggctcactgcagcctccaacacctgggctcacgcgatcctacagcctcagcatcccaagtagctaagactacaggcgtgcaccaccatacctagctaactttttaaaaatggattttttgtggagatgggggtgtcactgtgttgcccaggctggtcttaaactcctggcctcaagcaatcctcccacctcagcatcccgaagtgctgggattacaggcgtgagccactgtgactggctgatacacataatttgatgcaggaggtgataagtaatacggagaaaaataggccaggtgcagtggctcacgcctgtaatcccagcactttgggaggtcaaggtgggtggatcacgaggtcaggagatcaagaccatcctggctaacacggtgaaaccccatctctactaaaaatacaaaatagccgggcgtggtggcaggcgcctgtagtcccagctacttgggaggctgaggcaggagaatggtgtgaacctgggaggcggagcttgcggtgaaccgagatcgtgccactgcactacagcctgggcgacagagcaagactccgtctcaaaaaaaaaaagaaaagaaaagaaaaaaaaataaagtctattccctgtgccccagtcacagccctgcagctgctggaaaaccaccacattggcggggtgtggtggctcacgtctgtaatcctagcactttgggaggccgaagcgggtggattgcctgagctcaggagttcaagaccagcctgggcaacacagtgaaagcccgtctctactgaaatacaaaaaattagccgggcttggtagcatgtgcctgtagtcccagctattcaggaggctgaagcacgagaattgctagaacccgggaggcagaggttgcagtgagctaagatcatgccatcacactccagcctaggccacagagcaagactttgtctctaaaaaaaaaaaaagaaaaagaaaaaacaaagaaaagaaaagaaagaaagaaaacaaccacatctagaaccttctctgtaccaggctaaataccccaaacgccttctaccattcctccagggacaagagtgcaagcctcttcaccaccccagctgccctcccctggactctgcttgtgtctgggaaaccacttgaaaggggagcacaagcccctcaatggtagtcaggcccaagaaatagcccgcaggacccccagagccccagccccagtccccaggtttccatcatgcagctggctttcccacctccagccttggcagccactttatgcgcctgactcatcctagcccacaagaagtggggatccccaaatcttttcctcgtgagctgctgctaaaccacatctctcccaactcattctaaacttaaatgccaggatttatatttatcccagtagtttcatctgttccgaggcagatgtcattccagcctgcccatgaggccttcgggttcctgacctgacatctgcactctccagataagttatcccttaaagcctggtcctcctgtctttaggcagagccggggacaagccctatggctgtcagagggacctccttccaggtggccttgctcctgtgtggaccctcgatgtgtagctgcagaggggatcacaaagcccctgagatggtggaagcctcatgttctgacaatcgagcgggtcaccaattataaaattggtttgaaatcttatagatcggaagttcctggccaggcatggtggctcccgcctgtaatcccagcactttgggaggctgaggcgggtagatcacctgaggtcaggattctgagaccagcctggccaacatggtgaaaccccatctctactaaaaatacaaaaattagctgggcgtggtggcgcatgcctgtaatcccagctacttgggaggctgaggcaggagaaacacttgaacctcggagccagaggcttcagtaaaccgagagattacaccactcattccagcctgggcaactgagcaacactccgtctaaaaaaaaaaaaaaaaaaaagttcccacacctacatgaccatcagaatcacatttttaaatctctgcaacttcgccaggaacacatggggaacttgaaacaacaacaacaacaacaaattcccaaaatccattgccccagtgtttctgaaccagtccatccagggtggagcctgagaatttgtggtgttttttaagctctggcgttattgaatccatactggctcttaatgaaccccactgtcctttctgaacacccacgaacaattgcttccagaaatctaagtctccatggctcttttctgaaaggtcctctttgtgcagactgggacataatccttctgacctgtgtgtctggtcctgagcaggttatcagttattcaaccaatggcccaataaagctgtggggtcagggatgaactgccaggtgtctccttaatcaggggcctctcctactctgtccttccactccaccatctcaccatggcagtcctgctccttgctctgcaggatcaagaagacagggcagattgggaagggagtgatgccatgtcccctgaagttccacctcaaactaggagcccaaactagggtgaggtaaggaggcacctacctggggtacaacatctaagatggcaccaaaactcaggaatcaagatagagaatacttcaatgcaatattttaaaaaatcaaaatgaatacaaaaaaataatattttgatgaacagaatatcaaaagtttattatgttttttatagaggcaagttctcgttatgttgcccaggctggtctccaactcctggcctcaagggatcctcccacctcgagcctcccaaagtgctgggattacaggcgtgagccaccgtgcccggcccaaagttttaaagaaatacaggtttagtcatggttccaaaccatttcagagcctgagatacaaggaaaaaaacagtaacagaaacaatgcagagagcagaggggaaaaaaatctcaaaattgttctaatatcctcagagagagaagatattacatccacaaaaaaagaacaggatgcttttttgttaaagaaaaataaatctgaaaataaaaaagagctcttagaaattaacaatacgatagtagagaaaaaaatcagtgacattatgaaaataagattgagaaaatcctccagaaagaagaacaacaagcacactaacaaataaacaacaaaaaatgcaaaagagacgcacagcagaagagagaagaaaaaattgaaggatcacttccagaaatggacatctaaccatgaggaattgtagaaaggagaaatctgaaagaaataaagcaaaaacgctttccagaactgacaaatgtaagtctcttgattgaaacagtcccccaacgtccagcatggcaaacaaaaacagccagagaaggtcatgtcactgcaatttcagaatgctggagttacagggagtaccctgagagcttccagaagtcaggggaaaaccggcatacacaaaggtcaaaaataagaatcacaccaagcctctaacagtgaatcagaagccagaagacaatggagagatgccttcaaacttgtgaaagaaaactattttcaaggccttgagcggtggcttacacttgtaatcccagcactttgggaggcagaggctagcaaatcacttgaagtcaggagtttgagaccagcctggccaacatggtgaaaccccatctctactaaaaatacaaaaaattagctgggcatagtggcacacacctgtaatcccagttactcaggaggctgaggtagaagaatcgcttgaacccaggaggaggaggaggttgcaatgagccaagattgtgccactgcactccagccttggcgacagagcgagactccatctcaaaaaaaagaaaaagtaaattattttcaatctagaattctatattcagccaaaccactagtcaaatgaaaggacagaataaagatatcttcagacatgcacgttctcaagggaatttttccctctgtgcaacctttcccaggaagctaaacaaacaaaaggatgaagcaggaaagagaagacacagggtcaagggaacaggggatccaacacaggagggagacaaaggggttcccaggacgaacagaaagggaggccccaggatggcacccgtggtaccagcaggcgagtggctgggcgggattggagtgcaggacaggagagaagtttctcggggggataaaggaactgacaggtttgaccaccctgaattatcttattttctttcttttatattttttcggagacagagtcttcttctttttcccaggctggtgaggtcacagctcagcacagccttgaccgcccaggctcaagcaatcctccagccttagcctcccaagtagctgggactacaggggcaaaccaccacatccagataatttttgttttaattttttagagacgtgggtctcactatgttgcttaggctattctggaactcctgagctcaagcgatccacccgtctgggcctcccaaagtgctaggattacaggtgtgggccaccatgcccagcccacactggaattacatttgaggctaggggacgtgtaggaaaatgtagctacggtaggcacagaaaactaagtaagcaagggcaggagagggggccaggatccaggaagagccaaaatcatacaagaaaagaaacaatgttatgaccctgcctggattagaagtgaacactatgtacatgatcgtcacaatccacaaccgagcacacggattgaacaggaagattgggcggcagggtgaaaggttgctcagcgggagtatacaaaagccaaatctccctgagccgcagcaggccatgaataggtacggcctaaaaccagtgcacagagaggtagcagtacagtataagcaaatcccttggaaatatggaagtaaactccagaggaaacagcccagacagagccttctgagaaagggaagggggcaggccccaggggagaggaggggcaggactgctgttttgttttatgattttagcactatttaaccttttttttttttaactgtcagcacatactaatttaagaaaatagttattaaaatataaaataaatctatactgagaagaaggtcctcttgttgcttcttgcgtcctaagaatccaccctcatcactcccagccgcaggcacctacacacacagccacaggcacactcacacttacacatgctcatcacagacacccacaaacagcccacagtgacagacaggtacacatacataatatacaaaatcatctgacacaggtgcgaacccagcgtccatgacacacacacccattcccagaaacgcacaattatattaatagattcacccccagacacaccgaggcttccaagagcctcccggaaaccctgagagaagagcactccctccaggcctctcctccctgtgccagcaccccagaactgccccaggccaaggaggttgtctccaggagctgcaccctaattgctttctctactcagccccctgctgagtgcccagcccttaggctaagcagccattaatcctcttgcgccccagtctgtagatggggcagaaatggggtggggaagggccccatctggcagctgagatgtgactcataaggccactgtcagctttttcttccctaagtcatgggagagtccagtttcaggaatgctgtggtcaggctgtgcatcctgatacaatccatttgatgtctctgggtccaggagggagtaggcagcctatgaaacgctgagatgctgtgattttatgacccagtctgggccctgcttccatcccctccccggggattcttctctccaccctgtcctccggggccaaccccaaatgatatgtgatttgcatgtaggacaagcacacctggggcagctggtgagacctcccccacccccacttcgctccccctccatgttcctccagcactcaccaccaccctggtcctgttatctggcagcgtgtccatggccagggtgcccccacccaggtcctggctcagctgggtcctgtccggctctgacacatgcccagggctctctcgggctctccggttccagccccgcacggtccctttggcagcccatccagagcctgggccctcatcgtgacctgggagaaggggacagaaacctgagtgccagcagtccggaatgaagatcaggaggggaatccagcccagttattctgcaagggccccaacaccatgccactgtagaatttgcagacacttgactgactaccaggacaggagacacccaatgtgtactgagagtcacgtgcccagctccaggccaagcacttcgcacatatccttttaatcctcatgccagctctccgcagtagttaggatgttctccattttgcaaacaagaatcagaggctcagaggttaaaagtcacgcagtgggttaggcatgcaggtaagtttcaaacccaagctgatctgcctccaaagggtgattattctcaacctcagctatacactggagtcacctggacagcttcaaaagttcctgatgtctgggtcccaccctagagatctcttgtaactggtctatggtgtagcctgggcattcaatttctttttctttttctttttttgaaatggagtctcgctctgtcacccaggctggagtgcagtggcccgagctccgctccctgcaagctccgcctccagggttcacgccattctcctgcctcagcctcccgagtagctgggactacaggcgcccgctaccgcgcccagctaattttttgtatttttaatagagacgaggtttcaccgtgttagccaggatggtctcaatctcctgacctcgtgatccacccgtctcggcctcccaaagtgctgggattacaggcgtgagccaccgcgcctagcctcgatttcttaaaagagcctcaggggagattttgaggagtcttggacttaactctgcaggcaagggtgagaaccattgccgttgagccttccaaaccagtttcttatttctctggcagaaatggcacataatcctatttcccagtggggtcaggggactagaagccagagttcttttcgttcagggcttctcaacctcggtactattgacatttggactggataattccttttccaatttttttattgtggcaaaatacacataacaaaatttgccatctaaccatttccaagtgtacaattcagtaacattaaatacattcctaatgttgtatgaccatcaccaccatctatctgcataactcttttcaccttgtaaaactaaaattctgtacccgttaaataataactccctattcacccctgttattttattttatttaagagatggggccttgctctgtcacccaggctggggagtagtggtgcgatcatagctcactgcagcctccaactgctgggctcatgcgatcctcccacctcagcttcctaagtagctgggactataggcatgcgccaccatgcccagctaatctttttactttttatagagacagggtctcactattttgttcagggtggttggtcttgaattcctggtctcaagcaattttcctgccttggctcccaaggtgctgggattacagatatgagccacagcgcgcagcctgtatctatgattttgactactctaagtatctcatataaatggcatcatactatatttgtctttttgtgattggcttatttcacttagcataataaattcaaggttcattcatgtcgtagcatatggcagaattgacttccttttgaaggctgaataatattccattgtgtggatataccacattttgctaacccactcaactatcaatggatgtctgttttgcttccacgttttagctattgtgaacaatgctgctacaaacatgggtgtacaaatatctctttgagacctggccttcaattcttttgggtatatacccagaagcggaattgctggattgtatggtaattctatttctaattttttgaggaattgtcatactgttttccatataaaatgttttccatgtaaaatgactggaccattttacattcccaccaaccgtgcacatgggttccaatctctccacattcttgccaatacttgttattttctgttttttttatagtagccatcctaacaggtatgaggttatatctcatcgtttttataaattggcatttccctgatgattagtgatgccgaacatcttttcatatgcttgtgggccatttgtatatcttctttggagaaatgtctatttaagtctttttcctgtttttaaattggattgttggttggactggataattcattgttatgcgggaactgtccagtgctctgtaagatgtttagcagccgcagccttggcccctgctcactaaatgccagtagcaccacgctcctccccatcccaagctgtgacaatgaaaaacgtctccaaacattgccaaatatcccctggggaataaaattaacccccccttgccccattgagggaggggtaattttttactgttttactcctatcactacctagatactgtctaggatggcaaataggtttcatatcacatgccatctgcaatccattcgtgacagccagaggcactccaactgagaatgcaaaggctcctcttgtatttagcaggaaggactgtgaagatcaataagcaatgtctgccatgggcacaggattggaaagtgactacacacaggccatttcgcggccatgcgaacctccatttctggaggttgcgaaatggctttaggttccatgatctcctctccagttccctctaggttgttaaatgcatgctttttttgagacagggtctcactctagcatgcaggctggagtgcagtggcacaatcacagctcactgtacgcttgacctctcaggctcaagcaatcctcccacctcagccttctgagtagctggtactacagttgcatgccaccacacccggctagttattattattttattttgtatttttcgtagaggctgggtttcaccatgttgcctacactggccttgaactcctgggctctagcggtccttccaccttggcctcccaaagtggtgggattataagcgtgagccactgcaccaggtctgttaaattagttctaacaaaaggccgggcgtggtggctcacacctataatcctagcactttgggaggctgaggtgggtggatcacctgaggtcaggaattcgagaccagcctggccaacatgacgaaaccccgtctctactaaaaatacaaaaattagccgggcatggtggcgggcacccataatcccagctactcgggaggctgaggcaggagaattgcttgaacctgggaggcagaggttgcagtgagccgagattgcgccactgtactccagcctggacaaaaaagcgaaactccttctccaaataaataaataaacaacacaaaaaccatccttttccacttcaaaaagatttatgccccccaaagctgtggcttttattgtcattctaatggtcacacctactatggatgtatatatgagaacagaccatcagataggtggatctgacattccccacctatgaccctcttccatttcaggcccaccctgtgtcagatacctgtctcaacctctgccttcccccagcccactccccagagctcctggatgtggctctccctctcctagagcacctacgtgtgcgactatgtgcctatctccctggtagatttgagttcccccaggattctctccaccttcttcaaatttggcatgtccagcaaacagcaggtgctccatcactgcagaattgaggacgcagtgcatagggtagctcctgggagccagcaaggacagaggttgagaccaggcttggccaggcccaggcctggggctgaggccagaactccgctgtggggccctgctttgtcattagacattgtatccaattaagtcattcttggctgctggcgcctactggacccttgccggccccctctcacttctctgcccctaatagcaaccagatgctgctggagcacgtggggaggagggcagtccccagaccccttccccaagatgcccactggctgcccacagatggacatgagtccagggctgggaaggcagcctgcccactgcccaggcccaagccagggctgtctggtctctcttgggtggggcccacagctgcttctggagacagagctgtttgtgctgggctggtctgcccagctccccaggtcttcctgcaagcagccctggggcctgggcaggagccagaacaggatagagcgggtagtgaacaagtggaggggctcagcggcccagagaggagtgttggggatcttcaggattcacaaacctggagccgagacaggaggcgggatggtggaggcctgcagcccggggaaggacagggagggggcccagctgggggtggccagggaagagacactgggttgacctccacacccagtcttgccactcacaagttatgggaccttagccccatcagttttcctctctaatcctcagctccctagtgactcaaatggatttgacgatggtgcccacagtacaggctgccataagcgtcaagtgagaaacacaaatgaggttttatagagagctcaggccagggtaagaggtaaagagtccatgaaagagggcagggcgagggatggagagggagcttgaccaggaccctggcctaccctggcctagccctgaatcttactcttccaacccatactacatctgtttcctggccacccttccttccctgttgcctgggacaggacgtcatccccacgactcatgaaagaagccaacacagctggttgctcacgtgtatgtgcaggggcccacgtgcctgtgcacatgcccacaaagactttcctgaaagcctcggccttcccgtatgtgctcacacacaagttggacacctgcccaaccctcagccactcctcaccccacctgccttccactggagagagctccattttccctggacccgttccccgcctgcatgtgttgccaaggagcttccggaacacaagctgttcattcattgattcactcactcatggccccaagtagtgtgcagtccagtgggatgccataataatcaccctagtaataaaaatgatagctgactttcagagaatgctgctctgtgctagcactattccaggggctttaaacacatccacccccttaatccccacaataatcccatgaaatagttactagtttaaaatccattttacaaatggagaaactgaggcacaaagacgttaaggaacctcccaaggtcacagaaccagtccatggcaggatctgaactcaggcaggctggctccagagcctactcagaaccacagaaagtgcagtaaaaagtgaccgacaatccccactgtttcccagggtgcaggggcagccccggggtggggctggcatgtgggctaggttcttggagggccctactcaggctgccattgggcctgaacctgagagcttccctgggagactgtgtcccccagcatgcagggtacagcccagcagtagcgtcccagtcccctcagctggcactggtcccatttcagggcaagggggaatggggctgacctcaggaggccaggttgtgcggccccagagcctgggccaagccatcctcatctcacccaacacccaaacttggcatcccagccctgggccaccccatagctcaggttaccacagcctctatcctgggtcagcctccacccttaatgccctagagctaatctcccccaccatagccaggacaagccacctagagggtgaacttgattccatctctctccggcttccagctcacctgtccctggctcatcctgtcccacaggctgagaaaaagaggagaagagaaaggaggcgaggggaggggagggaagggagagcatctttaaatgccctgagtacctgagatacaccgaactggaaacacccttcccttggaacttcattgtagtatcagagcagtaaaacaacacaggtttggaatcagacaagctagacactgaaccctgaatctaccacctactaactacaacattggacaaattacacacactctctaagactcagtttcctcatctgtgagatggggctgataaaacataaacttggtaggtttgacactttaacaaaatcatatacacagagcacccagcaagtcgccctgccttccctgggtttcacatgaggactgaaaccgtcttctcagggttaacaagaattacatgccgggttctgggcagaagtataggagtaattaagcattaatcaggctgcacttcggcccattccttttttttttttttttttgagagggaatctcgatatgtcacccaggctggagtacattggtgtgatctcagctccctgcaacctccacctctcgggttcaagcaattctcctgcctcaccatcccaagtagctgggactacaggagtgcgccaccacacccagctaatttttatatttttagcagagatggggtttcaccatgttggccaggctagtcttgagctcctgacctcaaatgatgctcccgccttggcctcccaaagtgctgggattataggcatgagccaccacgcctggccagcttttatttaagaattgtttaaggccaggtgcagtggctcatgcctataatcccaacactttgggagggtgaggtggtgggatcacttgagtccaggagttcgagaccagactggacaacatagcaagaccccatctctactaaaattttttttaaagtctggacatggtggctcatgcctgtagtcccagcactttggaaggccaagacaggaggattacctgagcccaggagttggagatcagcctgggcaacatggcaagaccttgtcttttttataataaaaaaaggtattataaaatttaatttattattaataataaattttaaaaaattagccagatgtggtggtgcatgcctgcagtcccagctactcaggaagcagaggcaggaggatcacttgagcccaggaagttgaggcagcagtgagctatgatcacaccactgcactccagcctgaacaacagagtgagaccctgtctcaaaaaagaaaaaaaaaaaagaaggattaagatggttttcggatcctgaattccagcagaagggccaattcgaagaccctcagacaggaaatgatttttttttttttttttttttttttgagacggagtctcgctctgtcacccaggctggagtgtagtggcacgatctcggctcactgcaacctctgcctcccggattcaagcaattctcctgcctcagcctcccaagtagctgggattacaggcatgtaccaccacgcccagctaattttcttgtgtttttagtagagacagggtttcaccatattgggcaggctggtctcgaactcctgaccttgtgatccacccacctcgacctcccaaagtgctgggattacaggcgcgggccaccgcgcccagccgaggaactgatttaacatgagaatgcagtttctttatttcttcatgcactcttcaaccaattaacaattcccacacgttggccaccccaccccaaaccccataaaacctctagccccaaatgctgccccacgatgatgaaactctttctctgctgccccctcggtgttggtgtgtcaacttgctgcaccttgggcaacacaccagttagggtcacaggaccagctttcagaggggccagggaaggctccaaaccctaaactgaaatcctgcctccaagttacaaagcccctaaccataccctctccctttcctctggcaggtagggacccactgaggaccctcacctggggagagggaaggagtcaaaggaagtgcagggagggaccaccaggtagcagaagggaagagggagggagggaaggggaggggaggggaagggagggacagcaagaagagttcagctctctatgtgtgtcccttgaggggagagtctgggatctgtgccacctctgatatactcactcagtcactcactcattcattcaatacacttttattgagtcgcaggcactgtgctgggtgctggggggacacaagccctgtacccaggaagagtctagttttcttcatggagacatacaaaatgaatcatttggtaagggctatgaagaaaatcagacagaggaaagggttggggttgttgctactctacacagagccatgaggtggggctctctgaggagggtccccttgagctgattaagacctgaatgagaagaagccagttagttatctgtcgatcggaggggacggcagctggagtgggttaaggggtgaatctggggagagctagagaagatggtgggatgagggaggggctgcctgacctccataagttcgcattttagtctcaggttgttggagccctagagacaatctggtccaacctccttccctcctttttttaaaaaaagatgggacctcgttatgctgccctcactatgtggcatgatcatagctcactgcagcctccagttcctgggctcaaacgatcctcctgcctcagccttccgagtacctgggactacaggcgcacaccgccatgcccagctaattttttattttaattttaatttttttttttgacagagtcttactctgttgcccaggctggagtgcagtggtgcgatctcagctcactataacctctgcctctcgggttcaagctattctcctgcctcagcttcctgagtaactgagattacaggcatgcaccaccacgcctggctaatttttactaatatactaatattaataatattaataacaatactaaatatactaatttttgtatatttagtagagacggggtttcaccatgttagccaggctggtctcaaactcctgacctcaggtgatccgccggcctcggcctcccagagtgctgggattacaggcatgagccaccctgcctggcctaaatcatttatagacatggggtctcactattttgcccaggctggtctcaaactcctggtctaaagctatcctcccacctcagcctcccaaagtgttaggatcacaagcatgagccaccgtgactggtgcaagcccccattttatagacggggaaaccttcctcagagaaaggaggaagctgtcagggtcaccagtagttggtattgagcctggcctcctgcaggactcccaggccaggatgccaactctcgctgcctcttctttatctgtcatatgcacctctggttccatctgaccagactgtcagttccctgggcccctgctctgcaccccaaggccattttcctgtctgtcatcctggtctcccctgctgtctgactctgtctttgggccactcatctctctgctgctgctgttctaatgatagatgaggtttcaaggctctaccaaacaagcctgtccatcaggagcgaggggagatctcagctacttcccaaggccccccaccagccccacaaacccagagccttggggaaggatgctagcatctcttcaggtcctgctcccagctgcccttccactggtcacaacaactccgccatcaatcaggtcaggctgcccctccttagcaactctcccccagaacgtccttctcctacatctggcctccccagacacccgcttcctcctcataggtcctcctgcctgtgaaatcccacctggcctgtgaaaagggcaccggactgggagtcaacagctgccgcctctggcttcttacagattccttaagtctaacctctatccctcctgctgcagaaaaagtgcatttctcctggctcaatctctgtcaaagccaagaagacaggatagcctctacttagagaagtgattcaagtctctgcctgccccactcttcctggtctcctcaaccgtctactaccccaaccctactctgaaggggccgccctcagccaggcccgggtctggccactatctcccagcccatccttgttacctcccaattcccccttccccagccctctccgtggttcacacaatccagccaaaggttcagatcctcccctcataaactctgttacacccagagttcagaagatcacaccaggttgaggattcaaaggagcccagaaattattcataacatatccaactctctcctgtttaccttgatttttttaaagtatcagttacccataaagaccctaacaaatatgaaaaggaaaggcaattataaaagatccttcattattccacgcacaagagtcaaagattttgccaacagcctcactttataaatgcaaaaataggtccagagagagaaagtaacttgtctaaagtcacacagcaagtgagatggcgggactagaagccacgtctctggccaccctctgtgtggtctccctgaaaattggtggttctcaccagcagcttctcggttcgtcagctccactgccctctgcccatacttcccactgtcagcctccttcccctcccacccccaacatactcttcttctcaatagggacccaggtctgtctcagctacatgctgggaccattaaagtcaagaacattgccactgacactgtgcctggtgccagcacactcctgagacacagcaggtcaaccacagcactcacctcaacagcgcctccctcaccccacctgaggggcacccatgccaatgatgcacaggtatctatcttcttaatcatctctgctgaggggccaggctgcaaattacccatctccccaaccccagagaaagtctaggtgcttaggggagaacagagactatgaaaattataccatgagggattccaggtagatctcagaaaggacttccaggtgggagagatgagtttggagaactggtaggggggaagaggagtgtgcagaatgggacgcctccctccaccccctaccccagtgccccatctagagccagagtagctgaaagccaaaggctgccagggcaaatgggagcaggtgtgaggagggggactcttgaggctgggggtgcagaagcagcaagttgcttcttcctgggcccactgcctctctactgacaccaaataggcaagggaaggtgaccgaatggctgctgccttcccaggcagagacgctgtgtccccaccatccccctggctgctcccacctatccctagcctggatcagctttggggtcgggggtgtggcagagaagaggaaaagaaggcatggctggggcaggggcctccccaggctcccatctcatcagaattcagccttgcctggggtgatcaggggtcctgatgactctcccgctgtcccctttcagagcccatggccacatagagccccctctcctaaggtccctccagtatccttccaggagagaaggagaggtccgggcatcggtgtctccaccgtcactcacacaccctatgtgtttgggaaagtggggtccctatccacctgcccacagcccacagctctcctggcctcctgcggacaatgcccccctcgcggacatcgccaggccgtccacacctgcccatgcccacacctgactgcccgtccctccccgcccccggcccacccgggccggctcccgccagtcctacctgctccgggctgggggctcagcgcccgggcagcctccctgagcaccagcaccaggagccagagctcgcctcgcatggtgggtgcccggacctgcccccggcctgcttgctgccccggtcctgacgagggagggggccctggctcaggctgcggccgcgcggtccccggggctggcggaggggcgggcggcgaggagacggcggagcgcggggccgggcgagccggcaggagcggcgagagcgcgagcggagctggaggctgcggcctccgggagcaggcggggagctgggggggccgctgggtcggtgggggtgggggggagctggggcagggggcggggcggggggcgcggcgtcgttgggggctctcccggcgcctgccctcagccctaacggagcgctcccctagagctctgcagccgctcccaaggcaaggggtgcagagtaggggacagggcgggagcccctcgggctgagagaacccctagaagcatcagccgccccgcgctcctcactgagctcctggctccctttccctcctccgttccgccgggaaagctgcagagagaaggcccgaggactggacccctggaagggacaggcgccccatccctgggtcacgggcccctgactgttccccgcccccagctcctccaagctctgcgacttcctgagctgttcttcggaattctgtgcgtctctgatgctttgtcctccagcccccacccccagaaatctccccctgcagcaaagacccccagcttttctccccaagaggggcctgaatcccaccccccttccatgactccaccttatccctccaccccccatttccagcaccgatttgccccccaagcctagcagacgtgagggtggagggggcctggctaccccttactctgcaacagtctggacccctccccacgagtaggtaacccaggcctcctgcctctctggggcctccaggcctactcagggccagacccaatcaatcttcagagccagccccagacgaggaaatggctcaccccacctgtcaccaccttctgacaggctctggggatagataatctttttattttttcttccaggacagaataaaaatacccgcaatgtaggatatttaatagacggcaaggaatcaggtcaggacacgaagatgcctcttccctcccctgacctacttcgttcttgtgacggcaaggagctggggcgctggagagtgggagacggggtgagggggcatcctggcttctagtgggctggggcctagggactagaaaaccgcggagaggaagggtgcgaacgctgagcgccattggagaaattttccaggaggagggatatgggcggggacaggagaaggtacactgtgggctggaagagacggattccgtggcactgaggttaaaaaaaaaaaaaagaaaagaaaagaaaaaaaaacacctaagaaaggaaacaactaaaggctctctaatctcttagaacgccggttcctccttccgccgggcccagagtcccagagactacctcctccagccctaaacccaatgtccccttaccgtggaacaaggcaaggccggtctgtaaattcttcttgatgtctaatttaaatcccaacttggcggactctcaaacagaatcagataggcagctacctccagctgcagctacttgctgccctcaagtggccacgtgacgagccacaaccctcttgtcctgcgggtttcctctttccccagcctgcccaccccctgtctccgacctcctgccttcctcgaggtcaaggtgagaagtctcgggacggattccagctccagccccggcgtctttgcacattcctccatctggggtacctcgtggtctgtcttacaagaagagctcaggctgaaacataaacttgtaaatagtagaagcaaatgtgtaaattttaacgtaagcctctagaacttgagatcgtaatcacctgcagggtgtgtgtgtgtgtgtgtgtgtgtgtgtgtgtgtgtgtgtgtgtgtattttgtttgttttttgagacaggttctcgcacgttgcctaggctggagtgcagtgctgcgatcatagctcactgcagcttccaactcctggactcaagcgatggggagcgtatatgaaaacacagatttctggactccaccctcaagtttctaattcattaggtctgggatgaggcccgagcgtacccaggtaatgctgctggtcccaggaccacattttgagagccactgctgttgaatccccagttcctttcagtccctcactgctcctcgtctgccagtaggagtaaaagcaaacagcttaggaaaaatcgacacccaggacaaaaacagtatctcgaaaaggccaaagagggggcacccggatttgaaccggggacctcttgatctgcagtcaaatgctctaccactgagctataccccctctgccggcaaaccgaccgcacgtagtcgtttagtggtattgctgcgcaggcgctgtgtggcgttcccgaagggaagtggaagtggggtaagacgtttacaagagatggaaaaaatacaactcccagaagaattactcacttggaagcaggggttgttccctgaagctctgagctgaagatccccactggcagtataagaaaatatattcctggggtgtggaaggagaagtctctcgaaatatttcacttcgggggcgtcccactctcctgccctgcagaagaccccttgccacgtctcggagcttctttctccctcccacatgctcacgcggcttctcccgacctgtcttccccagcccagcccttagaaactcagcctccttcccgccaagaaagagccaggctgacctgggggtgcgctcgcctccgccctgccattgcgaggttgagccacccgtaccgtgttccaagggtcagcccggagctcctcgccctcactcgcattgcattctaccctgggtacacacacaggctgagccactggcaggggccaggactccatcctcactcgcctgcgaaagcaaaaagggtggcagggctcgagactccctcccattccatctgtgcgggaactctttagaggacctccggagaccaacaaaacgaggtaactccggagcacagagggggcacccggatttgaaccggggacctcttgatctgcagtcaaatgctctaccactgagctatacccccgccacgccactacgttgtcattagagttaatttctatggaataggggtgtggtcttcattttcccttaaagttttaatctgagggttgcgtcgggatacctactgaaaaaaacacaaaatacaatgggaatggctagaactcctgagttcttccttcatagccacgctttcggaaaaccaactagattaaggaatcttgggccgagagcggtggctcacgcctgtaatcccagcactttgggaggccgaggcgggtggatcacaaggtcaggacatcgagacctcctggctaacacagtgaaaccccgtctctactaaaaatacaaaaattagccgggtgtggtggcgggcgcctgtagtcccagctactcgggaggctgaggcaggagaatggcgtgaaccctggaggcggagcttgcagtgagccgagatcgcgccactgcactccagcctgggcaacagagcgagactctgtctcaaaaaaaaaggaatattgggtcctctatatccgtgcctagactctcccccaaatgtccactgactggcttgagaaaaggactgtccccaggaccgccccaggtccagggatgtacagatgaacagactggatctccatcttgtctcctgggcttttccaaccccagggtcgctcctccccttctctcaaaccaaaagccagtttgaggaacagacagaggagaaggctgaaataagaggtaagcatttttcaatagcatttactacagccttataaaaatcctaatacagtattttttttaaaatcctggccgggcgcggtggctcgcgcctgtaatcccagcactttgggaggccgaggcgggcggatcacgaggtcaggagatcgagaccatcctggccaacatggtgaaaccccatctctactaaaaatacaaaaaaattagcagggcgtggtggtgcgcgcttatagtcccagctactcgagaggctggggcaggacaatcgcttgaacccgggaagcggaggttgcagtgagccgagatcgcgccactactgctctccagcctgggcggtagagcgagactccaacaataacaacaacaacaaaaatcattacacaaagacaaacaagcagcccctttaggaatctggtatatttgggaggagtgggattcaaattggaaggacactagaagtaaaggggatgctgtggggtggcttaaagtccaagagctgtggtcagagtcagcatctcagagggaatgggaagacgaggagaagtggaatccctgcagtgcaaagggctgtccctatctgggacgtcctgtcctcctccatttccccttccagtttttgcctctgccctcctccccttgagcccaccttcttcaccttgctagaatctcctttgcccaaagggaatgggacaaaaatggctgaggggctaaaaagcctgagggtggaaggaggtttgaggaaatgaagagcaattccagggttttttgtttttgtttttgtttttttttgagtcggagtctctctctgtcgcccaggctggagtacagtgacccgatctcaactcactgcaacctccgcctcccaggttcaaaggattctcctgtctcagcctcccgagtagctaggattacagacgcccgccaccacgtccggctaatttttgtattttgctttgttttgtttgagacggtgtctcgctctgtcacccaagctggagtgcaatggcacaatctcggctcactgcaacctccacctcccgggttcaagcaattcttctgcctcagccacccgagtagctgggactacaggcgtgcaccaccaccaagctaatttttatatttttagtagagacagggtttcaccgtgttagccatgctggtctccaactcctgacctcaagtgatcctcttgcctcagcctcccaaagtgctggattataggcgtaaaccaccgcgcccagcctcaggggtctcttaatctgcccccccaacacacacacacattattcctacggagagactgagggctgaggagagggagagagttccactcactaaatctgcaacatatccaacatttccctgacgtctccaagaaggatgcctgcggccatggagtgaggagcagcttcttctgctgtgctgtctgcaggaatccaaggtatgcagtccagcttctcagcaacgggttgggagaatggtgtcaatctcactgtccatagcagccactgctcccactagagaaccatagaaaagtaataaatagccacttgattttccacccatgttgaccatgcaaaaccccaaagtttctggttgacctcagactggaacatcagttagcagcggcctgagattccatccactgaagtctggcaggcagcctgcagggaggaaggaacaggaggggtcagcctaacccaagagaatgatggccttcaagtctccagcccttgcccagatcggactgggtgcaggaaccaaagttacatccaataattcaattaacagagatgaactggcttgagtatctgctgtgcatcaggtactgtgcaaggctctggagttactggtgaaaatgcagacatgcccctgaggcttactgtctagtagaagagatggatactaaataaatggtcagacacataattctgtaattacatactgtgataaaggaaatatacagaggcctctggatgcctgagagtcagggagggcttctctgaggaaggagcctggagactcaccttgctgggccccttagctgtgtctctgggcaaggattcttcacggtgatctgtgccagaaagaggttccctacgcaagttcccccattagattgtaagcaactccggcgcatgggtggagtcttggtcatctctgtatcatcctcagccttggtctggcaccgcacagggaacatggggggtacttagaaaatgctgattgggccaggcgcagtggctcacgcctttaatcccagcacttagggaggcggaggcgggtggatcacctgaggtcgggaattcgagaccagcctgaccaacatggagaaagcccgtctctactagaaatacaaaaatcaactgggcatgttggcgcatgcctgtaatctcagctacttgggaggctgaggcaggagaatcccttgaacccgggagacggaggttgcagtgagctgagatcatgctattgcactccagcctgggcaacaagagtgaaactccactcaaaaaaaaaaaaagaaaaaagtggccgggcacagtggctcacgcctgtaatcccagcactttgggaggccgaggcgggcggatcatgaggtcaggagatcgagaccatcctggctaacaccatgaaacaccgtctctactaaaaatacaaaaaaaaaaattaaccgggcgtggtggctcacgcctgtaatcccggctactcgggaggctgaggcaggagaatggcgtgaacctgggaggcagagcttgcagtgagccgagatcgcgccactgcgctccagcctgggcaacagagcaagtggccgtcgaagaaagggaaggagggagggagggagggagggaggaaggaaggaaggaaggaagagagggaggaagtgagggagggagggagggaaagaagggagggaaaatgctgattgaactgactgtgggttgtggaagagggttctcctgacccagcgggtggcaaggacactgctagaaacgtgtggtcccttggactgacttgcctaaagtctccccttcttcaaaaaacacatctgcgccaggcgtggtagctcactcatgtaatcccaacacttggggaggccaaggcaggaagatcatttgagctcaggtgtttgacaccagccatgggcaacgtggcaaaaccttgtctctacaaaaatacaaaaattaccagggcatggtggtgtgcgcctgtagtcccagctactagggaggctgaggtgggaggatcgcttgagcccaagaggttgaagctgcagtaagccatgtttgcacaactgtactccagcctggggggtgacagagggagaccctgcctcaaaaaaaaaaaaaaagatacctgtgtgcccagcctgccatgattccacttgacaggtaagacgaaagggaagttttccaggcctgatgtaaggccctttctacgtggcccagctccttaaaatcctccaggtgattactcaatatctacctgcttagtgtcccttgtcagataacttacctaaaattgcaacattccctccacacacttccactctcccttttcttttctttgtttttgcttttggaaatgggggtctggatatgttgcccaggctggactccaactcctggccccaagccatcctcctgcctcagactctccagtagctagaactacaggcatgaaccaccatgctggcccaatctctgtttcttactctttattcaccttatcatttatcacttgtttttttttttttttttttttttttttgagacaggatcttgctatgtcacccagactggagtgcagcaacatggtcagagctcagtgcagcctggaactcctgggctcaagtgattttcctgcctcaacctcatgagcagttaggaatacaggtgtgtgccaccacatccagcggtttttttttttttttttttttgtaaagacagagtctcgctctgttgccaaggcttttctcaaactcctggcctcaagccgtttaccattttctttctttcttttttttttttttttgagatggtgcttcgctcttgttgcccaggctggagtgcaatggtatgatcttgactcaccgcaacctccgcctcctgggttcaagcgcttctcctgcctcaccctcccaagtacctgggattacaggcatctgccaccacacccggctaatttttgtatttttagtagagacggggttcctccatgttggtcaggctggtctcgaactcccgaccttgggtgatctgcccgccttggcctcccaaagtgctgggattacaggcatgagccaccgcgccccgccatcattttctaactgactatatatttttcttgtttatcatctgcctcccctaccggaaagtaagctccgtgagggcagggatttttgtctgttttgctcgctgctgtttctccagtgcctagaacagtacctggcacaaaggaggtgctcaagaaagatttgtgtactgaatggtgtcatttactctacagaaactctaggaggtataatgatcctcttccttacagttaagaaactgaagtcagagtgagtcaatgatttctgcctggaaggcttgttccccaggtctccccatggctgtctcctactcttcactcaggtctcagctcaaaagtcatctcttaagagaggccagccctgaccaccagaactaaatcagacctatccttctcccttccatttctggtaaccagtgggattcttcacatcacttctcagcacctaagattattgcggccaggtgcagtggctcatgcctgtaatcccaacactttggaaggccgaggccggtggaccacctgtggtcaggagttcaagaccagcctggccaaccccatctttactaaaaatataaaaattagccaggcgtggtggcgggtacctgtaatcccagctactccggaggctgaggcaggagaattgcttgaacctgggaggcggaggttacagtgagctgaggtcatgccattgcactccagcctgggcaacaaagagcaaaactctgtctcaaaaaaaaaaaaaaagagagagagattattgcatttaggcggagtgctacctctttctccactagaacaagcccctgagagcagggatgctgtctgcttgtggcttacccaccacatctcacctgtggggagatgccaaattggcttggcccaggagccaactgtgaaccagattctcacaggagagaggcaggagaagggttctgatggtcagtcatccattggttcagccaggccctagagatccaggtagggcagccactaacccttccctggtgagggcacagcagccttgtatatgccacgagtggtctttgatggtgctgagagtaaggaaatgggagatctccaccatcctcatggagtccttcacgtcctgcttattggcaaatatcaggactgaagcatcctgtagagcctgtggacagaggagcccagccccagtcagcctgctagtgcccagccttccttcctactgcctcacaggcgctctctggctccctctccagctgtcccaggaagagaggcccatgcctggatggggcagagatgggggccctgccacaatggtagcaaccgtatcaaataacatcagcagctcaaggaaagcctctttatgacaatcccataggtgggaattgatgatcctcctcattttatacttggggaaactgaggattagagaggtgaagtcacttgtccaaagtcctacagtgaatgaaagatggagttagaacttgaaccagcaactctggcttctatagtcaattgcactgagggtactgatgcccttcatcaggcacaaaccagccctcctcatgctgctggtatagaggctctcagaaactgggacagcaggaacgaatctcagagaagctaagtgaccagcctgagggcacacagctagtaccactgggccctctcccaactgcagggggcttacctcatgggccagcattttatatagctcctcccgagtggtcagcagccgatcccggtccgtgctgtcaatcacaaggatgataaactgggcagcagaggggagccgtgagagacaggctttctctttggtaaatgtgtttcctgccctctttctttccccactggtctctgcactgcccagatgtcagccccagagaaatgaaagcatgcagcctcaagatttcaccaccctgcttccattataattgtctttttttttttttttgaggcggagtctcgctctgtcatccaggctggagtgcagtggcgcaatcttggttcactccaacttctgcctccttagttcaagcgattctcccacctcagcctcccaagtagctgggattacaggcgcgtgccaccacacccggctaatttttgtatttttagtagagacggggtttcgccatgttggccaggatggtctcaaactcctgatctcaggtcatctgcctgcctcagcctcccaaagtgctgggattaccaccaggtgtgctgccacacctggcctgtaattgtcttttctatccagacatgggaatagcacacctctgactgtgtggcagaggctgtgctacataagcattgggtgttcatgactccatttaggccttaccacaacgctgtggacttggtactgttagtatccccattttacaaatgaagagactgaggctcagtgaggctatgtatcttgctcttgaccacacagctggtgagtagcagtgctggaaatggaacccagctctgtctcggtccaggaattataccactgaattctactcctgctggagtaagaaagtaaggcccctagagagaaggggcctacccatccagtgcatcaaacagaaagctgccagcagctgccaggaagtattcaaacacgttaacaggcaggcactgcactgtgttgagtatctgacatatatgcattacatattggtttgttatttaattttcacaacaacttagggagatcattatatatatgtatatataaaactttttttttgagacagagtcttgctctgttgcccaggctggagttgcaatggcgtgatctcggctcactgcaacctctgcctcccaggttcaagcagttctcctgtctcagcctcccgagtagctgggattacaggtgcctgacaccatgcccagctaatttttgtattttcagtagaggtggggttttgccatgttggccaggctggtttcgaactcttgacctcaggtgatccacccgccttggactcccaaagtgctgggattacaggtgtgagccacaggaaccgaccattataatctctatttcacaagttggggaaccaaggctcagaaaggttacatgacagtctgatatcacacgcctgccttggagacccttcagccctggtgccctcctcacctcagtgttggagtagtatgtgttccagataaagctcagagcctcaggtctcactatgtcccacatgaagaagtgggtcttcggcagaatgatctcctccacgttgctgccaatggtgggacacatatggaccacctcattggtcaagctggggaggtaggagtgggcaccaagagctcagtccagcctactcccaactctggcccccaaatgctctactcccaaagcagtctgaatctaactcagaacaagtccacccaggttcaccaaacacctgctcggagccaggccccgtgctgggccctggggaatgaagacaggagtgagactaagccctgccctggcttggaccccagagaagggaaacatcttagaggaggctcctcaaactttatctctttttttctttttatagaaacagggtctcactgtgttgcccaggcttaccttgaactcctgaccttgggctcctgtcaagagatcctcctgccttggcctcccaaagtgctgggattacaggcatgagccacagagcccagcctcctcaaactttaatatgcagttgaatgacctgagagttttgtcaaaatgcagattctgacccagtgagtctgggcaggggtccaggcttttgcctttctttctttctttctttctttctttctttctttctttctttctttctctctttctttccttctctctctctctttctttctttcacagagtctcactctgtcgcccagtctggagtgtaggtacgatcatgtctcccaggttcaagcaattctcccgcctcggcctcctgagtagctgggattacaggagcacacccccacgccaggcttatttttgtatttttgtagaaacggggtttcgccatgttggctgggcgagtctcgaactcctgacctcaagtgatccatccaccttggactcccaaagtgctgggattacaggcatgagccaccgcatccggccacagttttgctttttttttttttttttccttgagatgtagtctctctctgtcgcccaggttggagtgcagtggcacaatctcagctcactgcaacctccgcctccctttgtcgcccaggctggagtacagtggcgcagtctcagctcactgcaacctctgcctcccgggttcaagtgattctccttcctcagcctccagagtaggtgggattacaggcatgtgccaccacgcccagctaatttttatatttttttagtagagatggggtttcgccatgttggccaggctggtctcgaactcctgtcctcaggtagatccacccacttcagcctctcaaagtgctgggattacaggcgtgagccaccttgctcagccctttgttgttgttgttgttgttgttgttgtatttttagtagagacgaggtttcaccatgttggccaggctgctcttgaactcctgatctcaggtgatccgcccgcctcggcctcccaaagtgctgcgattacaggcactttgagagcaacagcgcccggccatggttttgcattcctaataagctttcaggtgatgcctgtgtgactggtctgtagaccacactttgaggagcaagagtttagaaaaatgagacagacacagtgagggacatcagagaggtgctttgtttaaagtgacatagaaaatatacacatgcttttatatgtaaataatgcttctgaaaagttacgcaaagttacaataggaggaaaactaggagccagaggcaagaaggaaacttacttttcaccgtgtattcctccattgtttgaaattttcctttataattttttaaaatcattacatgtattactttttcatggaaaagcttctcctaagtaaagtactttggaggctgtaaaatgggagaggtgccatccagagagcgaatatcggggaaagctgcgatcggtatttactcagcaccacccatatgtgccaggcttgctagaccaggagctacagagcctcagtgagcctttgggtttgaagaaggggaagaaagttaactggcagaggggacaggggtgagaaaggagggacctgccgctagagggagcgaagagcagggaggcagtttgggacacttggcaggcctggagctgggtttggcagggcccccgggaagatggaggaaagcagtgggagctagggttgcctgtacggtgcaggatttgaatgccagaccgaggagccgcagtactaggaaggtccaagcagcgtgcccaatcgctcctccggactacagaggagcccgggaacccagggaagagctccagtgattggtccccctgcctgtcagtctggtgggaggcccagctctctaccctccccgcccgagagtcacttacaaccggtagagaatggtggtctttccttcattgtccagtcccacgatgatgaccgtgtgctctggaagcgtcggaggaagggcagcgtcagggccaaacccgaagaccaagggactgtgtgcccccaccagacctcccaggaaggagatagcgctccccgcaggctggggacctctgcccaccgtaccgcgtctgcttcccacccagctccgacacctgccccactccgggacggtggaaaagacagctgagcccccacctcccttcacattccagaaaagtgtctgaaaggcccggggcgcttcggggcttgccaagagacggtgtttagagaaagagcataacgcgaagtcacaatcgcaggaaactcgcagcagccccccatccccgccgctggctccgtttagcggggagaaaggagggtcgcccagctttgcgtcctggggcgcaccgaagcgccgggacccaagaggagcaggcagggacgggggcaggggaggccgcggggcagtcgaggagcgcccatatacgaccctcggagcccgaggtccccccgtgcgtccgaccacagatcagaggagtcccagaagagggcgagatcaaagcgctcgcttggatgccctgtgcgccccttaccctggttcccgaagatgctcattaacttggcgatcagctgtcccatggcacttcccgggccggacaggtgcaggagggctcagcggcctcaggagcggagtcggccctggtattcggagctccgctcccccgggagggtctggcagattttgcctacgaagttagggaagccccacacgtcaccaacctgacctgggaaccctctgggacgctggcccttcgtgggcactatggacaccccagtgactaagggctgcctgtcccgggcccaagaggtgcaaggaatatgggggttccaggctccagccctccccctcgccctgcgaaaactcctgagttctccgggtggactgctccactaccgcaaatcaggggagactcagcactgcgcgcggaaccggatcccagctctccctcctctgagtgccatgtctagggcactagactgaagcaaaaccccaggcgacccactttctgtacctaccagctgtgtagtacagacagggctcaccgatcctctctgagctgggagaatattccaaccctccacagatgtgcagttggttcactagcgtgggtcttgtgggcccactcaaattgcattcccctggggaagggcagggtctccccttgatgcttggcaacttctaggataaatcagtactcctacaattcacggacaaacctactgcccaggcacagcttcctgatccccaaaagtgggcgcctgaagacaaggatggagcatgaagagagatcctccggctggagaccctgcagagaggccccagatacctggcagaggagtacatgggccaacagagaaccaggaggccaggcctgaggagggaatggaaggtggagtttcctgctgttgcttgtgaatttctttctttgcttaagctggggggaaaaaaacaaaaaatcagataacaaaaggagaagtccaaaaggcaacgtgccctcaggctgcaggaatggttagcaggagatccagccaacacaccagggagccagctccttccacccgactgtactgccttcctgcagcctccactaaggtaacaaccctccattaaggtaacaactttctaactggtctccctgcatcttcctctcctttcccaaggcatcctctccatggcccctattaaccttcctaaagcacagctcagggtctgtaactcccccagctcatagatcttcaatggctccctattgctcactggattcagatcagtctccacttgacattcaagagcttccacgaacagcccccacctgccttcacaggtttatctcccaggctctgtatctactggttcctgcctatacatgcctggctctttctgatggtgcctttgcttctgcatttcctccttgagtgcctttcaccttctcagaaaggagaatgcctgagacccattagctgccctgccataaaagccacctgcttccccagccctgacttggttctccagccacatggggcttctccctacactgggcttatagacgggcaagtctgtttcctcccatcaactgtgagtaccagggtgggattcatatattgttaaccagcatatgacctcccccgccagcccaatcactccctgcctggtccagaaccctgcacacaggaggaatgtgttgctgtcagactgatgtagaatgagttaagctacagcctgagaaatggcacttggagtattaaaaaaggaatgtgaacacaagtttaagaggattgaggaaggctgggaagtttgcgggaagaagaaggaaaatagctgactaaatacagactttcatcccaccctgcttggtgcccagagttagaaggatagagttgactgccagagcccatctgggctgattgcatttcagccttaggagagaaggagccaagtctggggctggggggtggggcaccaagggtgctgagggaagcagcagtgtcttaagcattttaccatctgtttcctggggttagtgggatgcggggaggaacatcttagtgcatgctgccctccccacctcctctttgcagaattgaaagtaacactctgcaagctggaaacacattcagtaaacagacaaggagagggcatctctctgagcatactctggctctggaagctgcctgattaaaaaaaataataattaaaagagaaaagaagaaaaaaaaaagaaaagaaaatagaaaaacagacgagaagatctgcctccactttgaggcccaggacctggatcttaagaagcattcattcgttcattcattcatttgacaaatatgagccaggaaatacatgaagtagacaaaacagacctagtccaggtgtttatgtttttgttttgttttgttttgttttgtttttttgagacagaaccttgctctgtcacccaggctggagtccagtggcaggatcgcggctcactgcagcctcaacctcccaggctcaagtgatcctcccacctcagcttcctgagtagctgggagtagaggtgaaagccaccactcccagctattttttttttttttttttttttgtagagatgggcttcgccattggtctccaactcctggactcaaacaatctcccgcctcagcctcccaaagtgctgggattacaggtatgagccactgctcccattcccagtctgggtctttatggagcttgtggtctagagagagagacagatacacacacacacacccctctgagagacagtaggaaggcctgatttagaaagaaagcaaggcacccttctctgaagaaaatgagaggtgaacctagctggacttcctgggtcgagcggggacttggagaacttttctgtcttacaagaggattgtaaaacgcaccaatcagcgctctgtagctagcaagaggattgtaaaatgcaccaatcagtgctctgtaaaaacgcaccaatcagtgctctgtagctagcaagaggattgtaaaatgcaccaatcagtgctctggaaaatgcaccaatcagcactctgtaaaacgcaccaatcagcaggatcctaaaagtagccaatcacagggaggattgaaaaaaagggcactctggcagggtgcagtggctcgggcctgtaatcccagcactttgggaggccgaggggggcagatcacgaggtcaggagttcgagaccagcctgaccaacatggtgaaaccccatctctactaaaaatgcaaaaattagctgggcgtggtagtgcccacctgtaatcccagctactcaggaggctgaggcaggagaattgcttgaacccgggaggcagaggttgcagtgagccgagatcgcgccattgcactccagcctgggcaacacagtgggactccatctcaaaaaaaaaaaaaaaaaaaaaaaaaagaaagaaaagaaaagaaaggaaaaaaaaagaaaaagaaaaaagcgcactccgataggacagaaacagaacatgggcggggccaataagggaataaaagctggccacctcccagccagtagcagcaatgtgctcgggtcccgttccacgctgtggaagctttagttctattgcattcttttgctctttacaataaatcttgctgttgcttaatctttgtgtccgtgccatctttaagagctgtaacactcaccgcgaaggtccgcggctccattcttgaagtcagcgagaccacgaaccccaccagcaggaaccaactccggacacaaaaagattattggagctaagacaaaatttttctctaagatactgaactgggacagccccttgtccctggaccatggtggcctcagcctagttctctttagtgtagaacagtggaaaccttaagccacatgtaggacctgggcctctcccacatcacctcattctgggacagaacccactgcaaaaacaggagcagctagtcagggaaggaaacaaagggtcccaggtagcagaagtccccagtccctcagttcctgcctggtctcagctgacttcatggttgtcgaaatcctcacacatggacaaccactaacttgctgatggtgtagccagagttaattgagagcttctgattaccaagaaacaagaatctgcccccatctctcgctatctccaagccagctagaaatgcctttcctgcaagttccaggcaaatgcaatttcttttctctcttttttttttttttttttagacagagtctccctccatcgcccaggctgtagtgtagtggctccatctcagctcactgcaacctccccctcctgggttcaagcgattctcctgcctcagcctcccaagtagctggtattacaggcacccaccaccacgcctggctaatttttgtatttttagtagagatgaggtttcaccatgttggccaggctggttgcgaactcctgaccgcaagtgatccacccacctcgacctcccaaagtgctgggattacaggtatgagccaccgtgtccgggctgcaaatgcaatttcaggcagaaggcacatggggcacaaatacactcagacacctgcttcctccttctcaaacccccagcccccgcttgcagaagctgatgcatcctgggacaagggaattagcactgaacttgggggtcaaaggcaccacagaacttgacatctatatatctgagttcaaatccttgcctcatggctgtataactgtggtcaaatagtttaacctctctgaactttgtaaactggagttaataatacctgacattgattcaaaacatcagactctactccagacctctctgtggagctccagaccatgtacccagctgtcttttcctcttctctctcttttttttttttttttttttgagatagagtctcgctctgtcacccaggctggagtgcagtggcgtgttctcagttactgcaacttccacctcccgagttcaagcaattctcctgcctcagcctttgagtagctgggattacaggcgcccacgaccacacccaggtaatttttgtattttcagtagagatgaggtttcaccatgttgcccagtctggtctcgaattcctgacctcaattgatctgcccacttggtcctcccaaagtgctgggattacaggcacaagccagcacgcccagcctctgcttctcttcttgaatgtcccacaggcacctcaaacccactttgaccaaagatggactgatcacttctgcccctaacttctttgtttttttttacctgcttttgctgagaagaccaccatcagcagtcactcccttttttttttttttttttttttttttaagacagagtcttgctctgtcacccaggctggagtgcagtggtgtgatctcagctcaccacagcctcgcctcctgggttcaagcgattctcctgcttggcctccagagtagctggaggcgtgtgccactgcacccggctgatttttgtatttttagtagagacagggttttgccatgttggccaaactggtcttgaacccctgacctcaggtgatccgcccgcctcggcctcccaaagtgctgggattacagacatgagccaccacacctggccacctctctttctctctcttttttttttttttttctttttttttagacggagtctccctctgttacccaggctggagtgaagtggtgtgacctcagctcaccacaacctccgcctcccaggttcaagtaaatctcctgcctcacctcccgagtagctgggattataggcgccgccaccacgcctggctaatttttgtatttttagtagagatggggtttcaccatgttggccaggctggtctcaaactcctgaccttgtgatccacccacctcggcctcccaaagtgctgggattacaggcgtgagccaccgtgcccggcctcaccttcctttctcttatcagccgcctccacttgctctccaagagctcaagatgctaacatttatttattaatttaatttctttattgagacacggtctcgctctgtcatccaggctggagtgcagtggtgtgatcatagctcactgcagccttgacttcctgggctcaagagatccaccatacctcagcctccctatcacagcctcccgaatagctgggactacacacgcagctaatttttaaaattttttgtaaaaaggtgggtctcactatgttgcataaactagtctaaaactcctgggctcaagcattcctgtccccttagcctcccaaagtgctgggattacaggcataagccaccaagcccggccatctaactgctagatctctctggcctctttgcctcccttccagtcccactgctgtggcgtaaggcaaaccctcctttcgcacctggattatcacagctgtttctaagctaggccttccaatctatgcgccaaactgcaaacaaagcaatcttgctaattgcttacaatccttccatttctgcatacgagcttcaggacaaagcccaaactccttaacatgactcaaggcccactgtgacctgctcctgccaattcaccttgagagcacactttggtggtgaggtgccaagaatatgtcatgcatgtcccctgctttctctgccttgaacactttccccatttgtctgctaaccatgcttccagattctactcaagcctcacctctgccaggaagcctcagctgacctccccaggttatgggactaacccctctttcaggttcccacagtacccaatgctcccacagtacccagtgctcccacagcagagagcacattatgctgtgctgaaataatctatggcccctacgtagacttgtgcctggtacataggaggtgctcaataaacatttgttcaaggaagaaacacaggaatgaatgattctgtaggaaggcagtgggaaatgcactatgctgggaggcagagactaggctctcatcaactttgccattggctcccccagggaactggggtcagccacttgacctctgggcctgcccagtttccctttcctttgatccactaactcctcatctgtagggtcttgggggatgtcttttgccctacacacacacacacacacacacacacacacacacacacacactcactcatgttgggcctcagcactcaggtagcggactcaggaattttagtcctccacggcgaccagcacaaaaaacaagaaccagggtgggcacagtggttcatgcctgtaatcccagcactttgggaggccaaggtgggtggatcacctgagatcaggagcctggccaacatggtgaaaccctgtctcaactaaaaatacaaaaattggccaggcgtggtggcaggtgcctgtagtcccagctactcgggaggctgaggcaggagaatcacttgaacctgggaggcggaggttgcagtgaaccgagatcgcgccactgcactcttcagcctgggcgacaagagcaaaactccatctcaaaaaaaaaaaaagaaaaagaaccaggagggaggggaaatagtttgagggtactgtgtgaggcaggacacaggtggttgcagtaactgtcagaagtccacatcctgccagctggggatgggaggaatgggtacactcacctgctgactttcagtctgggactggcagaatccctgattttctctgacctgcccccacaagtagtctgcctccctgtccccaaagctggttagcaggaacgaggggggcattagtggagccagaagctcagcccctccctctcctgaggtgttggggcacagtgatgccacaagagcagaaaaacagtcatgtgtatttaagacattgcaccagtgggtctggatctcacccactgagcaacattgagcttcccattgcctttggctctacttgtggagagacaggtaagtgaaggggctcagggccagtgtggagctgggactgcccaagcagctcctggcttgggcacaatacatcagagggccaaaatcaaaggatcatcttttcttttgagtcaatgactcagggcacaacatcttcaggcacccaccctttcaactccccgtgcatatcagcagctcccaggtgcctacgctgacgactatgtggcgaggacaaagaagcaggcttgggaggcagccacaaaggacaggacagtggttttatatatggcaaaatacttctcctaggggagtacagacaaatatagacagacagatgggggcacaggacaccagacagggaggggggaagggagggcagtggtgtcttctaatcagtaagtggaagctgcaccccacccccaggtggagggtgggacattggcacaggaggtggcgagacaggcatgaggtgcccatccctgaggcgggcagccgggcaggccccagtccttgttggcacactcggctctctctggcccagctgggatgctggggaggggcagggttgctgggctacagggatgccaaggcaaagggatgccccaggggagagggggtaccaaggcctctcctgggggaagtgaacatgggtaacaaacagaatcacgagaggcaaatacagagcagcaacagcagcagccaagccccccagaggagatccgaggtcccaaggcaacccctgggcaccatcccacgggtcctctcccctggggcctcagggtgagggtgaaggagcagttttttggtttaaaatgaggcggaccagagtgttccatgggctccacacccaggtggcacagggatggggggctcagatgcagaggggccccctctactaatggcagcaggcaagggatgttggaggccaagctcattcctggggtaggcaaaggctgaggcatggaggtggggggtggggagcagcgtctcggccgctcactcctcagggttctgggccctggacgttgccatggccacggagggtagagggtgctgtatgcctgccagcttccacccagaaccctccccaagacaagctccccatggggtgtccatgctatggctttcaccgaccagacgatgctgccaggaagctgggaggaaggggcaggcagggtgagggaccttggatctggggtctggggaagagagcccccatgggaaagaatctgtggcctccctttccaggaaaagcgcccagcccttccccagtactgcagcttgggagaaggagagccatcccacttaggaccgtcacttagggccccgagtagaaagagttaaggaagtgcaccttttctctaggagggtgagggaggagagccccttaagatgggagaaaggggacacttcagaaaggtgggtatcccccatccatccacaacaggcaggtaaaaaccgacagctggggcttaagggcctcccgggagctgggatggtaacaccaaagaaaccccaagctttgagcaaaggcatctgaaaggagggagacagcgccccctggaggcgaatacatgtcaggtgtgagcccctcgctccctcccctcccctgggctcagagcccttcctcccgccgtgtggcccctgcctctcagcgaatgtagacgcctcgtccccagccctccagctcattcttgttgcgccccaaaactggacccccaccctcagcgcagtagcgggccttattccggccccggttccggttgtcggtcagctcttcctcatagtcttcttcctcgtcctcccaggatccctgtcgggctgggggcgtgccgccccctgcagggtctccaagccctggcccctctgaggggtcagtctccatgtccacacatgagtctcccagctccgtgtaggcagagtttcggctgccgggggtgtcggcatcaaaagtgtcttggcgggacagtgcccgtagcgtgcctgcccggcctggtgggtggctgctggggtaaaggcctgggggctggcccagctcccctgggtactcgtgcatgctggcgtgctccccggtggcccgttccagtggctggtccccggaagcaaggtagggtccctggttagcagacggacagcacacaccatgcagatcaggcaggggtgagaaaaacacaacaaagcaaggcaagttagtgacagcattaagaggtccggcctggatgaagagggtgctggctctagaggaggggccccggggacaaacggctctggagcccagccagaggacagacctcagggcatttgctcctctctcgggacagggggcacccgaccttcaacagatgtgaggacatatgaactctcagggcaactatggccaacagccgtgagccatgagtcaccgcttcctcagtgcaggtcattaatgctatcttggggctaactgtcattaacagctcagtattgccactcattagcggttgattcggttagtcattgcctttggttttccaaatatattaacgggatttcagctcaaacctgctgaccctggcttcttcgacccacaccaaaccccaatctcaggcttccagaaccccatgcttctcccaccattccctagtcggatgacaccatctccaaggctgatgggattcctcccttgcccccaacaagcactcaaagcagcaagctggggaaggctgctgggtctccccctcctactgaagatgaagaggtggcccagtgtccttatcatcaaatgtcacgtggaggtggggcacaagaggggttccagtccctcccctgccatgtcaagctgtgtgaccctaagcaaacagttcccctctctgtggcctcatttcttggttgtaatgtgatgggggttagacctgagtagcagtttccaaactgttacctagagatctggggtggcattgggtgggaagggcacagaagtgcttcaggggtccccatggaggtggaggggaggccattcccctggctccctcagggcagagcaaggatgcattatctaacatcctcagcttccacgtaagattcattgaacaaatgggctctgttgctgaaaacaaatttgaaagctacagtctagaatgatttcatgggtttcttctggctcttaagaccttatacttaatggtgtgccatcaagaggtgggctgtggctcccatgggaggagggcaaggcaggatgggtctcccatgggaggtcctttcctggactttaactgggagaatggtggaaggttcagcatcaagtcatagaagatgccacattcttggtccctcttgaggggccttgtggagtcagggctccagggagggagagtccaggtttaacgtaggtttccctggctctgaaggcccctgctctgttgggtctaaaaagggtgtggagtccagcgaatcagtttatcagtcttcctcgcatgtccttcctagtcccttgtcttaaaagcgctcccatcaggcctcatatccagcgggcagcagatgcgctcctatggcaccaggcccaggaagacagcaccagaagccccagacccatcaaaaaccacagacaccagaagctgccgctcatcttatttttttacaaaataaagctcttcccttcctcctccatgttccctgcactccagttccgaccccagagcaggagggaagacgggcagggcgcccactacatggcatgttcctgctcctggggcaccacactgccccgctgtgaggactccagcccgccccagaagccgaggtttctcctgagcgaggtgagcacctgtacctggaggttggagacaggggcagggctggcagccagggctgcggtagccatggtgcggttcagcagcggattgggtggcgtgctgctgggcgggtgtgtggccttccaataggcttccaagtactccgccagatgctcgcaggcatcctccaattggttctcatccaggatgatgtcaaacatttcctgtgaaggcggggttagggggcagggctgggatgagtggggcatggccaagggggttgagggtgtggcctgggtgcagtgggtagagtcaagggattgaaggacaaggttaaaaagaggcctctggatgtagaagggaaggagagctctcagatctacagattggcagaactgcaagaagttttggcactcagtccaactccctcattctagagataaggcaaccaaggctgggagacagggcttgactctccacgcagaagggtgcttctggggcttgaacccagtctttgactgacgggacctgcgctcttcccagaagaccagtctgcacccacaggcctgacccaggtgttcctggtcaccctgtctctcatgtaggccagaggaaaccaggacaacccaaatgttctccctccattcccttccctgggatctaggcactcacaggggggcactgtgccagcttttccgaggccgctatttggacattgaggtgtttggactgagactttcctcgggacttgatgagcctttgaagtacctggtttggggagagagaaaaggaagaggagctagagggactcaggcaatgcacccagtcagagaggcgggtcctggttggatcagcatggagagccagtgtcaagacccttgaatgctccataactctcagccctgggcacctctgcagaaaggacctcagcagccctgtgtctaccctatgcaaagctcaggctctctcctggtgttatgccagccttccttaggggctatatgaagggcagtgattctccttctcaacttctctaacattgtttgtaggcccgcccactctcctttttttttgtttttttttttttaaattttagagactggttctcgctctgtcacccaggctgaagtgcagtggtgtgaacatagttcacctctaccctgggctcaagcgagcccccagcctagcctcctcagtaactagggctacaggcacgtgccatcataccccactaattttttttaatttttttgtagaaacagggtcttattatgttgcccaggctggtctgaaactcctggcctcaagtgatccacttgcctcagcctctcaaagtgctgggattataggcgtgagtcactgagcccagccacaccctctatattaacaacggcaacaacaacagtcttcctttatggggcacttgctacataccagcattgttctgtgcttttcacatgatcaattgagtcctgacaacaatcctgttagatagctgctattatcattctcatctcaacaacaagaaccataattataataatgcaaaaccggaaactaatcatgaggaacaatcacacaaacgcacactgagggacagacagtctacagaatagctgtcctgtactctgcctaaatgtcagtctctggaaaattcaagaaaggctgaggaagccttccagattaaagaaaactatactggctgggtgcggtgggtcacacctgtaatcccagcactttgggaggccaaggcgggcagatcttgaagtcaggagatcgagaccatcctggctaacatggtgaaaccccatctctactaaaaatacaaaacattagccggatgtggtggtaggcgcctgtagtctcagctactcaggaggctggggcagaagaatggaggcagagcttgcagtaagccgagatggtgccactgcactccagcttggacaacagagcaagactccgtctcaaaaaaaaaaaaaaaaaaaaaaagagggccgggtgcagtggctcatgcctataatcccagcactttgggaggccaaggtgggtggatcacgaggtcaggagatcaagaccatcctggccaacatagtgaaaccccgtctctactaaaaaaattagccgggcatggtggcaggtgcctgtagacccagctacttgggaggctgaggcaggagaacggcgtgaacctgggaggcggagcttgcagtgagctgagatcgccactgcactccaacctgagcgacagagtgagactctgtctcaaaaaaaaaaaaaagaaagaaagaaagaaagaaaactaggccgggcgcagtggctcacacctgtaatcccagtactttgggaggctgaggcgggtggatcacctgaggccaggagttcaagaccagcctggccatcatggtgaaaccctgtctttattaaaaaataataataatacaaaaattagcttggcgtggtagcacatgcctgtagtcccagctactcacgaggctgaggcatgaaaatcacttgaacttgggaggcagaggttgaggtgagctgacatcatgccactgcactccagcctgggcgacagaacaagactctgtctaaaaaacaacaggcaacaagtgatcctgggttggttcctggattgggggaaatgttgctatgaagggcattctataccggcacagtggctcacgcctgtaatccctacactttgggaggcaggggtggtggtggatcacctgaggtcaggagttcgagaccagccaggccaacatggcaaaaccccgtctctactgaaaatacaaaaattaactgggtatggtggcaggcgcctgtaatcccagatactcaggaggctgaggcagaactgcttgaactagggaggcagaggctgcagtcagccaagatcgcatcactgcactccagcctgggcagccagagtgagaccctagctcaaaaaaaaaaaaaaccaaatatggactatattttagaaataattcttgaattttacaattgcatcatggttgtgtaagataatgatgttgttcttaagaaacacaatataggccaggcatggtggctcacgcctataatcccagcactttgggaggctgagacaggtggatcttttgaggtcgggagttcgagaccagcctggccaacatggtgaaactctgtctctactaaaaatataaaaattagccaggtgtggtggtgggcgcctgtaataccagctacttgggaggctgaggcaggagaatcacttgaacctgggaggcagagattgcagtgagccaatattgtaccactgcactccagcctgggtgacagagcgagacttcgtcccccctcaaaaaaaaaaagagagaaagaaagataaaagtaaatgtttcaaaatttgtgaatctgaaaaaaattagactgtacacttaatttattttttattttttaatagagacagggtcttgccatgttgcccagtctggtctccaactcctgagctcaagtgatccacctgcctcagcctcccaaagtgctgggattacaggtgtgagccaccaagcctggcttatagactttaaatggctgaacttaatggtatgggaattctacctcaataaaatgttaaaaagttagtgaatcctggtgaagaatattcaaaaaataagatttttttgatactattcttgccacacttctgtaaatctgaaattatttgaaaatgaaaatcttcttacaaaatggaacagatatagttctgggataccaagcgtttatttttatttatttatttatttatttttgagacagagtcttgctctgtcacccaggctggagtgcagtgatgcaatctcggctcactgcaacctccgcctcctgggttcaagcaattcttgtgcctcagcctcctgagtagctggaattacaggtgcccaccaccatgcgcagctaattttttgaattttagtagaggcagggtttcatcatgttgcccaggctggtcttgaactctttagctcaggcaatccgccggcctcgggctcccaaggtgctgagattacaggtgtgagccaccgtgcctggcccaataccaagcatttttcatggttaacccatttatttaatcttcacaaacccagtatgcctatgctgcagatgaggaaaccaaggcatagagatgtttggccgcttgccaaaggaacacagagccagtaagtgacagccctggagtagaaggtccaggctgcctggttccagagtccctcctcttaacctcagtgggggaaatggaagcattggttactttctagttcagtgtttttgcatccattatctcatttggtcctttcaactcccctcaggaagtacttaaatcccatcatcccctttatctcattagaaacagaggactcagaaaggttaagtaggctgggcgcggtggctcacgcctgtaatcccagcacttagggaggctgaggcaggagaaatcacttgaggtcaggagtttgagaccagcctggccaacatggtgaaaacctgtttctactaaaaatacaaaaattagccaggtgtggccgggcacagtggctcacacctgtaatcctagaactttgggaggccgaggccggtggatcacgaggtcaggagttcaagaccaacctgaccaacatggtaaaatcccgtctctactaaaaatataaaaattagccaggtgtggtggcatgcacctgtagtcccagctactcaggaggatgaggcagaggaatcactggaacccaggaggcggaggttgcagtgagcaagatcgcaccactacactccagcctgggtgacagagtgagactccttctcaaaaagaaaaaaaaaaaaagccaggtgtggtgtgtgcccgtaatcctaaccccagctactcgggagactgaggcacaagaaccacttgaacctgggaggcggaggctgtagtgagtgagatcgcaccactgcactccagcctgggtgacagggcaaggctgtctcaaaaaaaaaaaaggttaagtaactggtccagggagcccagctcatgggatgataatggttaccactattggctgccctcataaatcagagagtaggctgggtgcggtagctcactcctgtaatcccagcactttgggaggccgaggtgggcagatcacgaggtcaggagatcgagaccatcctggccaacatggtgaaaccctgtctctactaaaaaatacaaaaaattagccgggccgtggtggtacactcctgtagtcccagccactcaggaggctgaggcaggagaatcgcttgaacctgggaggtggaggttgcagtgagctaagatcgcgccactgcactccagcctggtgacagagcaagactctgtctaaaataaataaataaataaataaataaataaataaataaataaataaatcagagagtatactgggctccttacagcaatcctctcaacaataacacgagagggattacaaccccactttataggtgaagaaatagagaatcagaggctaaataattcccccaagattccaagttcaataaaaaacaaccaacaataagaataaatcaatacgtaaaccaatcagagcttgaatttcaagcccatgctgtcttctaacttcaaatcctccacctcaactcttcctccgtgtttctcagatccccactggcatctagaagggaaagttaatggtgctgcaatacaaggaaaaagtaaggcggccttcctaccgatttcccctctatcaaagtccaaatgaggacactgcagcaaaaagggctgatatcaagagaggaaagcagcctgggcaacacagctaatcccatctctaaaaaataaaaatattagccaggcatggtggtggacacctgtagtcccagctacgtgggaggccgaggtgggtggattgctttagcccaggaggtagaggctgcagtgaactatgattgcatcactgcattccagcctgggtgacagagcgagatcctgacttaaaaaaaagaagaagaagaagaagaagaagaagaaaggaaagacctcccaactgccaagtagctgggtggcactggaacaaaaagcacagaattctttcagtccaagggtgggaagtcaatcagagtggagacaggggactggtctgcatgaccctaataatagtaaataatagctaacatgttgtatcagaccatttgctaagtgctatacattcatatgaggttgaaacacttgacaatacgatggagctttacagagaaggaaactaagactcaggcagattaattcacgtaattagtaagcagtggagctgggatttaaacccaagcagccctttcaaaccacgctgtcctggccagggtcaggctcctgcacccaccttgggagaggtgatcttgatgtaaacaatgatgggggccagcgaggtcttggacagctgggctgggtgattgatggtgtcagcatccagagcgaccaactgaagggtccgggccagctcgaagattcgctcgatttcactctgcacctcagctgggggcatggagtcatgtggatgggggaatgtcaggtggcctcccaggaacagcaggtggagggaacacttctggagatggccctgcccactacctcccacacctcccacccctcccacatccggcccagaaagggggagtgaagacagcaggagtaggctcacccaggctggagcgtgtgttggagcgctcaatgatgatgtgtttgctggggttgttgagaactgagcgcttagccagggaaatatctgccgtcacacgagtgatggagatcctggggaatggggcaagaggggagtcaggggtcagggtgggctggaatgccctgcccactccccagttccaggcccgccttctgttcctcagtccgagtcccaggattgtgattcgaggcatcctgcccatccccagcagcagagagcaacggcaggtgcgaggagcagctcccaggatcttacctgccatcaaaccgatgcttcaagaagtcaaataaagctttctgcatcatgtctgtaacctgggggtgggggtttgtggggagggagggaggagaaggcaggcatttaaagccgctcagactctgagtcgctgggtatttgtaccctcacgttccactttcttctggacaggcctttacggcgggcgggggtctgagtctgaggggcctccactggggtctctggttccaaggtccctgtaagtggcatctctgggagggctcttctgagggtttctttgggggacggggctcctctgagtgggtctttctgtggattgggccccctgggggttgtctctgaaagtctgtagccctcctgggaggatgccttgggatcgggcccttctaggggatctctctggggtctgaagatctttctaaggcccctctgcatccactcccctctaggaagtcctacctcgtagcccttgagcgacggtcccaccaggatgatgggcctcatggaaggcaccacgtcataggggggcacatgctctgtctggggggggaagcagggaggggaaaccccagagtggagatgacattagatcctctcccccagactccaggctcccccatgcagccttcccccaccctggtcccagagcccagatgtagggatcagggtgggggtggggagggatggccagggagaaccaggaagggtgggggaaatgggggacagatgtgggaatgggtgttagaaggtccccctagctcatcccagggagtggggaggaggacacagaaagctgtgatactcaccgacttctgcttctgtttggctgggtccagagattgccaagagagggaagggggaggagagagggaaggggacccaggcaggggcagagggcaaggcaggagccaggacaagagagggagggagagccgggcagacgaggagagataacagggcatgcgtgttagtgacagacagagccagagacggggaacgggaccccacgccaagggggagccagaggtggccctggatcagggctgggagcaggactgacagtcagtccagtggatgtgggaatattcagacatatcctaccctcttctgggtcttggaaaagagctggagagggtgacagcccctatcttgttgcccatctcctgcccccagtgcatgccaacatgcccattttaggggttcccttaactgtcttgctttgcagccagcagcccccccccactatgtgcccacccagagagtcaaaaaagggcaaagaaggaatgccatcccatgtcctgcttcacatgccaaggtagacaccaacaccagagcaggcccctgggagtgaggggagaggtcagggttcatgaccaccaaaccctgctgccccaggtgtgggggcaaccttccaagggcaagatctccttcctggagatcgggccagggtggagttgtgtgtggagggggatgtgcccatgctacccttccctccacctcagcaggaagccctgatgcccacagaacaggttggtaccacatctgaatccattacagcccccttccctccaccaaagtgctggccctgactcccccacctcttgcaagaacacagcgagaattaccttcttaaagaaggggatgcgtttgccatggggtggcggggtggtgacactgctaacactagtcttggcagagccactctgctcaccaagctcagcctcttcctcctctaactctagggggtctagttcaaaggctaagttagtcatttcattacctggaccggagagtcaggagagagggaggagggaggcgaggtggggagaaggagtgagatgaacgtggagacacaagtacagaacgcagggatggggatggggaaaaaagaaagaagaagaggtgaatggaacagggctgggagaaatgaatgggggcagggcaggggaatcaggcagagagatggagctaccaaagaaaagggagaggagagacatgacaggcccagcttgaggggtagcctactcttcatggagggggaaccactgcatgtgcttgggggactcaggattggggtgtttcctactgcagggaaaggaggattcagggagtggggagaccaccccacccaggagcttcttcccaaacccctgcatggcgatggctcttaccactggcagggggtgtggggcggcgggtgccagtcaccacatctcccagactggaactggagttatcgcctgatttgctgtgtgggcagaggcaaaccgagcttgtgagcaaagaggtgggcgtggggggctctcatcctctcacatgcggcacccccggaggtgctccagccccactggtgatgccacaggcagctctgtgccctcagggccagggacaaccattgaggcctagtccaggctgtatggcctctcctggggttggcagcatccccttcccctgccccacccagacacctggagccgaggcggttctggcgcagcttctgttcctgcagcaggcgaaggctgtccagtttgacggggctgggaatgaagccaacctcacagccctccttcaccagccgcccgatccaccagtcattattgtatttctgcaaagaatatggcaggtgggtggaaagagcaagagggaaactgcaggggcaagctagcagtcactctctaggggaaacgcccagactcacctcccagcccaggggtggcaccctcaaaaatccccagccctggctccagcctctgagtggagctgccaattctcaggacaactccaggaccagcatgctttctggccatggaccaccctgccaccggcccaatgcaattctgagagtccttctccccatgtgcccaccctactctacaaaggccgctggagtaaatgcggatacctacatgtccctggcacaccgccatgccagttcaggccccctaacaaaccctcccaacaaccttctgacctaagcattaccacctcatttttccagtagaaaattaagaggctcagagaggtggagagatttgtctaaggtcacacagcagattcagcctggctctgcttggctcagaagccttttgtccactagcactctggctgcctgtctcctggcacccacttccctgccctccctccagatacccacctccttgatgtgcaggaagtctttgggctcgaaggtgatggccactccctgcacaggcacctcatcccctggagacggattgtagccaacatttgtccgcacagcaaatgccactggcttggtctagaggaggcacacaggggaggatggcaactagagggcaaaccacaatgtaatgtacaacttcctgacagtagtggtggttacttggatgtttactttataatagttccttgaaatgtgtatggacatgggcagggtgtggtggctcacacctgtatttccagcacgttgggaggccaaggtacgtggatcatctgaggtcaggagtccgagaccagcctgaacaacatggtgaaaccccgtctctactaaaaatacaaaattagccaggcgtggtggtgggtgcctataatcccagctactcaggaggctgaggcaggagagttgcttgaacctggaaggtggaggttgcagtgagccaagattgtgtcactgcactcaagcctgggcaacagggcaagactccatttcaaaacaacaacaacaacaacaaaatgtatactgacactttgggaggccaaggcaggtggatcgtttgagaccagcctggccaacatggtgaaactctgcctctactaaaaatacaaaaaaattagctgggcatggtggcacacacctgtaatcccagctactcagggggctgaggcatgagaatcatttgaattcaggaggcagaagttgcagtgagccaagatggcaccactgcactccagcctggatgacggagcaagactctgtctaaaaaaaaaaaagtctgggcgtggtggctcacgcctgtaatcccagcattttgggaggcagaggcaggtggattcatgaggtcaggagttcaagaccagcctagccaagatggtgaaaccctgtcgctactaaaaatacaaaaattagctgggcgcagtggcagatgcctgtaatcccagttacttggaaggctgaggcaggagaattacttcaaccagggcagcagagttgcagtgagccgagatcatgccactatactccagcatggatgacagagtgagactccgtcaaaaaaaaaaaatgtatactgaattggcttgtgtggttttctccatgtatattaacttttacaataaaaaacaagaaagcaaaatgtggaattcagccctctcagggtagaggcggggcactcaggaatgaaaagggttgggggtggggaagcccacaatgatacccagaaaaaataataataatagcaggccgggcacggtggctcactgctgtaatcccagcactttgggagggcaaggcaggtggatcacttgaggtcaaaagttcgagaccagccatgactaacatggtgaaactctgtctctactaaaaatacaaaattagcatggtgtggtggcacatgcctgtaatcttggctacttgggaggctgaggcaggagaaacacttgaatctgggaggtggaggttgcagtgagctgagatggtgccactgcactccagcccgggcaacaagagcgaaactccgtctcaaaaacaaaacaaaataaattaattaaataatagttataggccgggcgcaatggctcatgcctgtaatcccagcactttgaaaggctaaggtgggtggatcatgaagtcaggagttcgagaccagcctggctaacatggtgaaaccccgtctctactaaaaatataaaaattagctgggcgtggtggcacgcacctgtaatcccagctactcaggaggctgaggcaggagaatcacttgaatctaggaggcagaggttgcagcaagccaagatcgtgccattgcactccagcttgggtgatggagcaagactccgtctcaaaataaaataaaataaaataataataataataataatagcagccaggcacagtggctcacacctgtaatcccaatactggcttgagggaaggagtctgagaccagcctgagcaatatagggagatcctgtctgttttgttttgttttgttttgagatggagtttcgctcttgttgcccatggtggagtgcaatggcgcaatcttggctcactgcaacctctgcctccttggttcaagcaattctcctgcctcagcctcccaagtagctgggattacaggcatgcgccatcacacctggctagttttgtatttttagtagagatggggtttcaccatgttggtcaggctggtctcaaatgcccgacctcaggtgatccacccacctcagcctcccaaagtgccgggattacaggcgtgagccaccgcacccagccagccctgtcggtttttaaaaaataaaaggggcagctgggcacagtggcttacgcctgtaatcctagcactttgggaggccgaggcaggcagatcaccaggtcaggagttctgagaccagcctggccaacatggtgaaaccccatctctactaaaaatacaaaaaaaaattagccgggcatggtggcgggcgcctataatcccagctacttgggaggctgaggcaaggagaatcgcttgaacctggaaggcggaggctgcagtgagccgagatcgcaccactgtaccccagcctgggcggcagtgcaagactccatctcaaaaataaataaataaataaaaggggctgggcacagtggcccatgcctgtaatcctagcactttgggaggccgaggcaggaggatcacttgcacccaggagttcaagaccagcctgggcaacatagcaagatcccatctctacaaaaaataaaaaatcagccaggtgtggtggtatgcctctatagttccaggtactcgggaggctgagatgggaggtcaaggctccagtgagctgtgatcacgccgctacactcagcctgagtgacagagagagaccctgtctcataaaaaataataaatatttaaatttatttattattatgttttttgagacagagtctcgctctgtcacccaggccggagtgcagtggtgcgatctcagctcactccagcctccgcctccttagttcaagcgattctggtgcctcagcctcccgagtaattgggattacaggcgtacaccaccacacccagctacgttttgtatttttagtagagacggggtttcaccacattgcccaagctggtctcgaactcctgacctcaagtgatccgcccaaccgggcctcccaaagtgctgggattacaggcgtgagccacagcacctggcctaaaattaaattaaaaaaaacaataatgacagtaatgaccatttagtgttccaggtaccatgttacacacttaacacatattctctcatttatattcatcacaaaaataaaaaatcctctgaagttaagtggtattattatcttccttttaatgtgactttcctaagatcacacagctattaagagtcaggaccaggtcaggcacggtggctcacgcctgtaatcccagcactttgggaggctgaggggggcggatcacaaggtcaggagatcgagaccatcctggctaacatggtgaaaccccgtctctactaaaaatacaaaaaattagccgggcgtggcagccagagcctatagtcccggctacttgggaggctgaggcaggagaatggcgtgaacccgggaggcggagcttgcagtgagccgagatcatgccactgcactccagcctgggtgacagagcaagactgcaactcaaaaaacaaaaaaaagaaatttttagcacttatcaagcccttattatgtgtggaaacagtataataacacgcacttattatacttattatactgtataagcaggcaggtattatagcccacattgtgcaggtgaaggacagaggagcaaggttcaggggtactaggaagtggctgggtcaagacttggccctggttctgtctgggctctctctacagcccaggactgggggaaatcatgccagcacagcccctccccacatctttctcaccttggccttctcgagctgcgctaatgcctggcgctctgcttccttccttaaggcttcccggtcctcctccagagatacatcagagtctgatggacggctggtgtaggactccgctgagccctgaaaatagagagagccagatcagggccattgctgcccctcccagctcctgggcctgggaaggcatggaggtgccacccatcatggatgcctcgagccccagccagcccagcatgacaccacaagggctaagacaaggtggtattaggtggaagggaccaggagctgagatttctcaggcccctggggaaagtgtggccctagtgagggtgacagcagcaagcaggagatgaaggcaggcccaaggacagctgcttggggcccagggaggggtgggaacctgataggggcacaaggcaagggaggaatgccagggacgagtctctactcccactgctccttccctcccctgcccccagcacccgctgagatagactcagctgaggtccagtggcatccattccagggactgcagccaccagcttcggcctgagctctctgcactatcagccgtggacggcctgctccgcaggatggggccaccacagattttgccagcttctgttcaagggtagagggagacagactcctacctcccctgctcctcttaactggtactgccagaatcaaacttcactacttacagccccagtcctcaggctctcctaggacacaagagaacccaagagttccaggctggtacagaccgaagaggcaagttaagagcaggatatgggacagggctttccctgaaatgagggctgctgggtgccagacagctggctttgaccacaatgaccaacccagagcacaagggactcctttagggatgcacacatatgtgtaagacacatgttgcccgtacagacctggtagtgggaatgcacgtgcttcttcatgtgtgtgtgtggatgtgcaagtacaagtgtgtggaggagggtgtgctctatagttggctgcatatgactgtgtgtgtacagccacatgtgagtgtactgggggggagctcccagacatctgtgaccctgaggttgggggacatgtgagggcaggaggcaagaggtgtggatttgtgtgactatgcaggggtggtgttggacaaggcataggaggttatgtggcaaaagaggaggactgcagggatgtaggggttctttcctgagggcagaaaagggtcacttggccaggaaggtccataagtttggcatggaggggacctgggaaagacagaaacaaagtcccacctctccccaggggcctcaggtcattagctggtgcagctgcccatctctttcccagacaaataatgaaaatgggagacccgcggaggaagggttggggtggagcgggggtcactaacagaagtggggaaagaggcatgaaggagagaaggagagaaaaccagcgtagctccccctctcccccctgatgggagcacgcagagtcaaagagccagggaaacagacagggagacagactagcagagaggcactcaccgaccccaacacacacgcgggcatgcgcgtgcacacacacactcaccaaccccaacacaaatgcaggcatacgcgcgcacacactcactgaccccaacacacatgcaggcacgcgcacgtgtacacatacacacacagttacatgcacacacacagacacacatgcagacgcacatgtgcgggcagacacacacacatatgcagacacacaggtgcacacagacacacatgtaggcatgcgcacacatacacacacatatgcagacacatgtacgcgcatacacacgcacacatcagaaatggcagaagacaggaaacagtgaggaggcatggagacacgctggagtaaaggctgccctccgtcagctttcctgagaggctgttctacccgctgccaccccactccatccccagctcaccaccaccacggtccggctgggcgcctccatcccggcaccctcagtgcctggccctgctggcctagggggtggcccaaactgcccgttcccttgggggctcgggttacaagcagagttgctacatgtgcagactgctagggtatatttagctcagagatgtggcaaggactgcccccctccaccactccccaccacctaccggggatcagagctggggagctaaaaggaggaagaattggaggctggggtctgactccctgggttggcaaacactgaaggagccaaggtccttttctgccaagaggggcaataaaagcacagcgtcattcttcccagccctggccatgtcctgcaacaggagggatgagggggtgattgaagaaaggacttcctgtctgttcctatacttagaaaaggctagaatgaagcctccccttcctgaacctcccaagtcagactgaggctcacatgtgccaagtgctgtagagacagaagaaacggaaagaagggcctcactctaattagtggtggatctgcctggcatcaccctcgctcctggcccaaggtggaagggaggggctcatctccagaggacccctcctctgtgctgtcttctgccctcaaatgccctgcccatttcctcttcaatacacgccttttccttgtctaatcccaagcccctctcgccttttttgggtaccaggctttggtgagatgctaagtagtcatagcaaccacatgcctctctcagtccctcaccctgagcctaagatggcccagggttgacagatgagagcagccgcttactgactgagcacagaagaccccagaaagctattctcagttacaccctttcaggcaggggtgctgggctatcatcttctctattataaaatcaacagcctcatgcctcaaccacccccacccccgtcaccatcaccctttctctgtgcttcttagacagtcatgtctcgaggtgaggagcgtgtttccctggccaggacctcaccaggactacagggacccaaacatccttgctctgcttttcctaggacctgcctccacccaaccctgtcacagattctgggggaggacatggaagcagacagccggcagggggagtgggtgacagcccgaagcaagctggagggaggcaggccaggctgtccctgaatgagatgacgcaggccagcaggcagcaggggagggtgcctggtgctgggggaggggccgggcaggggcgggggctgagcgagtgggtgccgctgacagcacatccagaagaggtcatggggtgtcagggtgatggggtggctccaggcaggtgacaaatggcacagggaagggtgcctggacaataccgcagacctggctcaccaatgctggtctccaccaaccagccacctccctcctctccgcccagcctccccattacctggcggacaaagctgttggatgtggtatccgaggacgtgctcccatctgaccgtttgaatcgccctttcctcttgctgtatttgccctgaagaggccaggaaaggaacaagagtagaatcagaagggccctttcccaaccctcatcttgccagccccagagctacagccaagcttgggaacagcactcccagccccacctccacccccctgcacattcctcctgaggtggtacgacccaaggggagggagggtctcccatcctcacggagagggcccagagcacagccaggagtggggaccagtgcaagagagccccagaagacccacacggaaaccaccaaaccaagccagagaggctgggaaggggggaggcgcggagaagctggaggctcattaggcagcagagctaattaagatgctgggcaggctgcagaggcctccgaggaagggagaggcagccggcagtgctgggtgttgggtggggagagcgggaaagtcacccccactccccctccgcaggagcagagcagggctgtttgtgttggtggcccccagagaggaggaactgccaacccagggcccagcctggcttctcccctgtgcccaactcttcccttcgctattcacagagtagggaggggatgacagctctcttggagactcagagccagatttctggggagggagtaggggcatggaactgtatttggagagtaaacatccagcctgatccctggcaccatgggggcaaattttgctccccactctcatcccttgcccagacaggactttttctcagctccctctctcacaatcacagtagctacaatcctccccaagggggcaagagggatcaagcttctaccctgtggcccccagctgccactgcccatgccccatgcccatggtacccatcaggctacgtcaatctaaatgtccctcggccccgcaccacatgagcctaggacacagccccacagatctctagggggtaagctggctcagtctcagagaccgggtggaggaaataccgcctgaccattcaggaagccacacgttcaggttaagggcgtcaggtatttccagtcctcttgtaagaagagctgcttctggccctccccagcttgtacccacacacacttggcctcagcccagttcagaatggggagagtgagtgagggctcagacttccaagtccccgcccttggtctccatcctagactttctttggccaaagaacctggaggggccatgaccagactgggggctttggctgctgggatcagggtacaagaaagaggatggaaaatgggagaggagggcccctggggacctttccaagatcctcccctccccgcccttctctcaaaccagacatataccccaactcaagttgtgatgctccctacaaacctaggaggatcacccagtgaatcccagacaccaccctcccccaccactgccaggctgggcaaagggagtggcactcagagggacaggggacagctgaaaggaaggccccagtcagctgcctcccaggctcaaaggggcctggggtggaggaaggtatttttaggtctgacttgacccctctacatacccatcagtcacattatcatggtggttacagctggtggccacagtaacagaagagttaatgctatccttggagaaggacactcccaaagaaatcccctggcgcgaccatcccagagcctgctggtcaccccatgagaacccaccgcgcccaagaatgccacttcctgggagtaaccaggggtgtaggaaaagtgtgcgggtggggatggagaagtagacccctcccccaggtaaaacagcttccccccctcctatgagttggcatccatccaactttccaaactttggaggcgtttttggggcgggggtgggggtggggtaagtcaacgtgggtgtggggggaggggagcaggtccgacatagagatggagcccaggtggctgggaggggacctcgaccggggttggctctttccccaccctcgagaaccagtgtctgcggctttgaaggcctgttggcatttggcaccgccctctgaccatcgcctcggccacctcctcgtgccacccccgccccacccacacccgcctggcgcccccgagcgtgctctgcgtcgccccccttgcctggctcgctttctagcctctttcaacctccccttctcaaggcccagatccccctccaccagcacccccacgctcagcccactgaagctggtgcccaagcggcaggaaccttgacgcgggggagataaggaggcgagggtgacaggcagcccacccgccccctccccgctccgcagcatcgccacccagccccaggcccagcgcccatcaatcacaacctgcaaggatggggggcgcgcaggcatccctctctcctccgcgcccggcatataaccccttcctctcccgcgcctctcgagccgaccttaacacggtccgcgggagcgaccccctcccgttgggccgggccaccacgcctcacctgcgggctggggtcgaagacctccatggggatctcctgggagggtgggtaagggccccgggacatgctggtcttctggaccatggagaggagcctcccctcccgccgccggcccggcccagccgggctccctcagcgcatgggagaggccgtgggagccgaaagcagcgcggcgcagccagcacccggtccagccacccagctcggccttcggctgcctccttcctgccttccctcgctcctcccgctctctccactgccgccgccgcctcccccgtaggctcagcatctccccgcgcccctccctcgctccctccctccgcccgcccggccccgcccctcgcagcccctccgccggctcggcgcacacaatgggcgtgcggcagcagggaggcaagcccctctcggctctaggtggccgcaggtgggcctctgactggccgtggggtgcaggcggcccgctggggcgggaaggcagaaactaggcgtggaacttgggggaggggtgggggggcggtctaccagtggatgccgagcgctgatggggattggcatggctggcaccaccccccttttgtcccaaacctctcttcctgcgggtccccccaacccactcctgtttggaccaccggaacttcccggtcccggtgatcctgggacctggctttaactcctttctccccagtgtggggcccaggctgcctcaaaccaaacagaaaagcctctccctccaacatggctctggggctgccggtgggaggctgaggctgagatggggagggtgtccaatagagacagcaaaataaatcccaggggtccaggagttctgccctaatcagtcactaggatacaccgcccccccaacccctgttcttccaaaaggccaggaatggggctgggtgaggtccctgctcttggatgagaaaagaggaagaaatatggagctgagagaggagaagctggtaaaatcagatctcatgacctttgacctagaattgcgccacctttacccctgatttagggagaaacatccaagatctggatgccacccaccatgactggtggagagaagaggaataggagattctgggcaatagactctggcgccaatttggctcaggctgtttctggttgtatagccccggacaaatcacctctctgagcatcagtttcctcctctcctataaaatggggttgctggtactgtggagtctgtgtcacctggtattattgggaggatgagggagaattaaatgaattgctggggtgtttggagaagctgtaagtttcaatgaaggggtcactcatgacaggaggacccattcccttcctactccaccccttctcctgctccacagaaaggagagatggagaagaccctctccaggtcaagtgaccttacaataaggccaccaccttgctgtgttccgcaggacaggagactatgggactcctcctcctcacccaactctaatagcaagtgaatggtcagtctgtcattcctctgatcacaacaccttggggaaggcggagcagtgagtgaagatgaagcccattagaaacgttccaggagagttccaaccctgagcagggtttccacctgccccttggagacaagaaaggctggcataaccgcaaaagtatgggctttgcaatcagaaatatctgtgttctgaatctgttaccttagctgtaaaatgagggcaacgctaatcgtgttgttgtgaggaagtagcataaatgttgcttccctttctctctcttctactttctcagccaggaaagttgagatgaaacggatagggtgatcagcaggaaccaatcatgagttggagcctcaattcagatgtagacttcttaaaccccagaatgttcttcttggatttttacattgggtgttccagatcagaagaaaaggactgctttttttttttttttgagacggagtctcactctgttgcccaggctggagtgcagtggcgcaatctcggctcactgcaacctccgcctcctgggttcaagcgattctcctgcctcagcctccccagtagctggaattacaagcacgcgccgctacgcccggctaatttttgtatttttagtggagacagggtttcaccatgttggccaggctggtctcgaactcctgacctcaagtgatccgcctgccttggcctcccaaagtgctgggattacaggcatgagccatcgagcccaacccaattttttttttttttaattttactttctgcaatcattcatccattcagccagtgcggtatttctgaggtgtgttcgatcgcggatccatgcctgccgcagtacagttgtgagccaaatgagactgagactagttcccgccctccaagagcttgcaagacccgcagtggcgtaaaaacactaacatcttttagtgatcgattctgcactccaggggttttcaatctactacaagagtgaataagagttcgcctttgtctgatatctgttgtcattctctctcgcttctttaactgattttttctcagctaataaaacatccacccacaaccccccgaacgcccgcaaacaccaggccactctagcaaaacctctctcactccgcctgcgcaatccagctgacttccggttacagataaccacgtgattgggaacccttgctgcgcatgtctagtaggaagtcggactataccactttccctacggaaggggtacttttttatgtttttaagtttaaaaccgatttctgatatttgacttttatcatttcaggcctatatggaggctatgagtgagtttagtgtggcagaagatgaaagaaccggacaggaatacggacgaaattggagcagggtttgggctctccccttcgcagataatgggaggagccgggcccgagcgagctctttcctttcgctgctgcggccgcagccatgaggtgagggcgagctggtctccatcaggcgctgacgcgtgtcgacaagggactgtcggtcttgggaccgcagctggggttgggggagatgaaatggaggccgccctaaagcggccggtcccggggtttggggtaggccggagcactttcgtcccgggcctccggagtgagggggggcggggagcgtcgcagcaactgagaccaggaaaagtctgccccggctggtgccgcaccgcacacgtgtccggtcgacccacgcgagcagagcaaacggagcgaacaagaccaagccgtgggccctttcttgcttggcacacccggagcggagccgatctctgctttcacgtgatgtagggcaagcctagtgtaggccccaggcctccgactgccgagagaggtgatctctaactcttgactccattcactcctttggcctctcataaaggaaatctctgcgaatagccgaacgaggcttgttactgtgataaaacagggaaataagcccagaaaacagagtaacttgcctgcattcctagactagaaatcaggtctactcacctcgaatattctttaaacgctgagtaccagaaatggcataacccccctattcaatccaataagtccttggcttgactttccagaggagaaatgcgaacatgaggctccgagaggtgaaggcatagcgtgggttttgaagtcttaaacccaagggggccagctgcatagcccagagccttaaagatgatttagggaagagtcttatttcgcggctgtggtgtgggtcacaaagggcaggtcttgatggggacgttcattcttgcccaggattggctttcagagtctaatcatgttttctgtgtgtctagtatgctcaggcttcagaagaggctcgcctctagtgtcctccgctgtggcaagaagaaggtctggttagaccccaatgagaccaatgaaatcgccaatgccaactcccgtgagtacctgggatctgtctcttcaccctacttccttcttttctcctgcgtcagattaatgataacacaattgtgttgacttttttttttttttttagacagtcttgctctgttgtccaggctggagtgtagtggtgccatctgatcattgcaacccctgctcccaggctcaagtgattctcccacctcagcctcctgagtagctgggattagaggtgtgcaccaccacacccagctaatttactctttatattttattttattttttttgggacagagtctcactttgtcacccagactggagtgcagtggtaggatctcagctcaccgcaacctctgcctcccaggttcaagcgattctccttcctcagcctcccaagtagctgggactaaggcacgtgccaccacacccagctaatttttgtatctttagtagagatggggtttcatcatgttggtcaggctggtctcaaactcctgacctcaggtcatccatccacctcagcctcccagagtgctgggattatcgacgtgagccaccacacctagcctgggttgacttgttacaaacctaggaaagttcattcagagtgtctataaaatggaggagtcattgtatcaggcttgttcttttgagtgtgctttcatatatttaaaatgtagaaatggccaggcatggtggcaggcatctttaatcccagctacttggtaagctgaggcaggaggatcatgagcccagaaattcaagaccggcctgggcaacatagggagactgtctcaaagacaaagggtatttctcacaacctctgtttgtgaaggaaaaagaaaagatagaggttttttgggtttttgaaggcaagaaataagttccagtgtttccatcctttttgagaccgtggggccaagaatgtgagcagtgtctctggcctggcctatttggactctgtgatgtgcttgggccccagttgactgaccaggtgcattatgctttcccaggtcagcagatccggaagctcatcaaagatgggctgatcatccgcaagcctgtgacggtccattcccgggctcgatgccggaaaaacaccttggcccgccggaagggcaggcacatgggcataggtaagtgtggtcatcttctccttaagaaatgataggtgctggcatctatgctgaaatatattcaggatctaagcactctgtctcatcttgagcctgtttcttactccttgatatttgatgtgttttctgcctgtgtgcaaatcagaaagttggtgctggtattggaattgagagtatccctggtaggaggtcacatttactaagtccctacctacactatgccaaggattctgtactttctagtttcagaatgatcgaaggaagctccttacaacgtgctgtgttgccttggtgcactgcctgttacacccacattctgcatgaagtgaatggggaattattgctgtatttgtgcttcctttaaaattgagtaaacgaaagaacttacgtagttgggatcatcatctggaaaatggaagtaatgctacttaaaatgaggttgtgaggattaaatgagttaaggaccctgacttgaaactatattcacttggtgtacttatacacagtgggcctgggtagtggcccgttcctaactcatcttctccacaggtaagcggaagggtacagccaatgcccgaatgccagagaaggtcacatggatgaggagaatgaggattttgcgccggctgctcagaagataccgtgaatctaagaagatcgatcgccacatgtaagcacaccctcttgggcccagtacccatttgctgctttgatggctagttcatttcccagagatttttttttttttttttttttttttgagatggagtcttgctctgtcacccaggctggagtgcagtggcgcgatctcagctcactacaacctctacctcccaggttcaagttattctcctgcctcagcctcttgagtagctgggactacaggcatgtgccaccatacctggctaattttttgcatttttagtagagacggggtttcactgtgttagccaggatggtctcgatctcctggccttgtgatccgcccgccttggcctcccaaagtgctggggttataggcatgagccaccacgcgtggcccacagagatctgtcttactggccttgggtagggagctttttttttttggagacagagtctcgctctgtcacccaggatggaatgcagtggcacgatcttggttcactgcaatctgctttcgaggttcaagcacttcacctgcctcaccgtctcaagtacctgggattacaggcatgtactaccacgcctggctaatttttgtatttttagtagagatgtggtttcaccgttggccaggctggtctcgaactcctggcctcaagtgatccgcccgcctcagcctctcaaagtgctcagattacaggcctgagccaccacgcccagccatgggtagggagcctttctaagaaagtttttctattctggtctttctttttttccctgtatgtcatcaggatagcccaacagtttatttgccaggcaagttctatctaggaactgcacacaaaaaagtcatggtttaggaagtaattcatgcagcaataggagaaaagaaaggaagctacaagcttagtgaccttgggtggaggaacagctcacaaggcagcctctgatccatcaccaaccagcatctcttcactccgtgtaccctgcaggtatcacagcctgtacctgaaggtgaaggggaatgtgttcaaaaacaagcggattctcatggaacacatccacaagctgaaggcagacaaggcccgcaagaagctcctggcgtaagtttcttttcagagtcttaggggaacattcttagacctttgagagttgttcttagatacttaaaatgtgccaatgcctaagtcttgacttgcacgtagtctgtcttaggaatacagctgttcccttagaggcacccactcctctgtcctgtacacacccactcttcctgtctcgtagggactagaggttagttgaagcaggagcctttggtgggcccagcaactcattccagaagctgactaggctcaaagggagaggtctggggatgtgcttctgtctccctagcatctcatctcttcccaaactgacccgtcttttctcttccctgaccagtgaccaggctgaggcccgcaggtctaagaccaaggaagcacgcaagcgccgtgaagagcgcctccaggccaagaaggaggagatcatcaagactttatccaaggaggaagagaccaagaaataaaacctcccactttgtctgtacatactggcctctgtgattacatagatcagccattaaaataaaacaagccttaatctgccttcctctctgcttcttgcaaggtttacggttactgagtgaggttttttttttttttttgagacgagtcttgccctgtcgcccaggcttgagtccgatggcgcagccttggctcaccgcaaactccacctccaggttcaagcagttctcctgcctcagcctcctgagtagctgggattacaggtgcgtgccaccacgcccggctgatttttgtatttttagtagagactgggtttcactgttggccaggttgatctcgaactcctgaccacaagtgatccacctgcctcggcctcccaaaatgctgggattgcaggcgtgagccactacacttggcctgctcactgagtcttttaccttgttttagtgggatgtagggagaaaaggaatggcttttatgcaagcctccaaaatactgtgcctcagaactgcccttcgaagcacgagtgacacctaagaagtggtctcagaatgttggttgggaccagtagttgtgacatcagttaaggaatcagtctttacaaaagccataggaaatacttagggtgtttatacttctcagctgacaagtgggggttacaaatgggacctgagcttggactactggctactacctaagctgtcactaaacagctttattgagatacagttgaaagtttgagacagaatcaccctgtcacccaggctggagtgcagtcggcaacccctgcctcctgggttcaagcaactctccctgcctcagcctcctgagtagttaggatgacaggcacccaccaccatgcctggctaatttttgtatttctttttttttttttttttttttttttttgagacggagtctcgctctgttgcccaggccggactgcggactgcagtggcgcaatctcggctcactgcaagctccgcttcccgggttcacgccattctcctgcctcagcctcccgagtagctgggactacaggcgcccgccaccgcgcccggctaattttttgtatttttagtagagacggggtttcaccttgttagccaggatggtctcgatctcctgacctcatgatccacccgcctcggcctcccaaagtgctgggattacaggcgtgagccaccgcgcccggccccctaatttttgtatttcttagtagagacggggtttcgccatgttggtcaggctggtcttgagcgcctgacctcaggtgatccacccgcctctgtgcctggccccccagctcttttctgaggaactcttctgttggagtgatgagctggcgtgcctttcagggcatgtaatgggctgatggaaaagggcaagacctgagtgggaatggcaggttggctatggtgtcagggccagcagactcctagctctgcctctggcgtcctcatgccattctgggcaggatgggcaggtgggtagcagaaggcagggaagcccacacttagaaatgtcccaaggaagccgggcacagtggctcacgcctgtaatcccagcactttggtaggccgaggtggacagatcatctgaggtcgggagttcgagaccagcctgaccaacgtgaagaaaacccatctttactaaaaatacaaaataagctagacatggtggcacatgcctgtaatgccagccacttgggaggctgaggcaggagaatcgcttgaaccgggagacagagattgcagtgagccgagagccattgcactccagcctgggcaataagagtgaaactccatctcaagaaaaagaaaatgtccagaggaccccccatcgtatgcctcacagcctgggatgagaggacactggcttctggatccccctggccactggagcggccagcgtgtttcacccattagctcttgccctttgaagtggggaagctgaggcctagaaagggaagggtcttggccaagctcccagcttggtgtgtgggacacctgcttcccaggcctggcccagaggaggaggggtagtggagactgcccacccccaacccctccatgcagtagagagatgacaggaaggagaagctgggtgtggtggctcacgcctgtaatcccagcacttttggaggccgagcgggagaactgcttgagtccaggagtttgagactagcctgggcaacatggcgaaaacccatctctacagaaaatacaaaaattagccgggcatggtggtgcacccctgtagtcccagctactcaggaggctgaggtggtaggatcacctgaacccgaaaggtggaagctgcagtgagccaagattgcaccactgcactccagccttggtgacagagccagacccttccccccaacccccaaccaaaaaaaaaaaaatgtcaggaaggagaatgaggtaacccaatatgagaccctcccaggattccagagcctgcagcgcagaagctggtttccaccctggaccagaagatggtgctactcgctcacaggtcaatgcaggtgtcagctgctgcctcactggagtttttttttggttttgtttttgtctgttctcgggggcgggagaaagagatgggttaggaagttgtaggaacccacctcttggaaggccttgggtttccccacttctttcctaacctcaccccaggcctgaagttggcctctttccaccatggtcctccaacctcttcccaggccagtgcctaggagggatccactcccacaggagccccaagcagaaagaacccctaaagtaactgctggatcttttccgggtcctgtagccttgagaaaatctgattaaaagatgtgtcctcttgtttccttacttatggaaaaagaaaaaagaaaagatgtgtcctgtcaggcacattggcgtgagcctgtagtcccagttattctggaggctgactgggaagggctacgtgagcccaggagtttggggctgcagtgagctatgacggtgcctgtgaatagacactgcatgccagcctgggcaacataataagtccctgtctctaaaacaaaaatatcaaaaataatttgttggctgggcgcggtggctcacgctcgtaaacccagcactttgggaggccgaggcgggtgtataatttgaggtcaagagttagagaccagcctggtcaacatggtgaaaccctggctctactaaaaatacaaaaattagccaggcgtggtggcacgcgcctgtaattccaggtattcgggaggctgaggcaggagaatcacttgaacccaggaggcaaaggttgcagtgagccgagattgagccactgcactccagcctgggtgacagagagagactccatctcaggggaaaaaaaaaaaattgtaaaaaaaaatgttttttctttcaagagcatacaagtgtccctatcatataattccacaccctttcaaggagctcgtgacccacacccttaccacgtaaagaatccctgagcaaacccaatgcttgattttctagaggaggaaacagagacccagaggagccagtgactcttctgctgtgctcagcagtgcggcaaacaggccgggggtgggggggctaggctggctactggctggtggcagacacaagtggggtgtgcagaacctcagtgctgcacgaacactggcgcctgactctgattcccaggctgcagtctcccgacgtgggagggtgtgattcagattggggtgcagcagaggcactgagcacagctgctactgcagggctgtgagctggagaagagggtacagaggggcctggcctccttccagtactgcctctgaggctacggcagggctaacctaggctggcttcctgcaaagcacagggaggctgaggctgccttccttgcactcctcagcaggtgcccccacctgcccaggcattgggtggacagcgggtaagaatgggggtgaagaaggttgaaggggccaaaggaagcagtgctggcaaaatgagtagggttgcaccgaggggctcattctctcttctccccacctccagcatccatctctccagactccctcctctttctgcatctccctgaagtccagggaaccttcatcccacacagtacaagccaggtgaagctcagcttctgtgtaggggggcatgaagggcacatgtgggtcagagacaacagagccaaatggtgggatttgggatcaccagtagcttcctaggcaccctttgccccagaccagtagtgttgctggtccgtccacccccagagtgggcacagaggagggcaaaggctacagtggggcaccaactgttcccaggccctaggctgtgagcatgctgcatggggttcagccacccaaaaaagctgctgtgctcagcagtgcggcaaataggctggagggggatgggcgtccaggccagctgccggctggtggcagacacacagctgggtgtgcataaggcgtggctgcaaggctctcaggctcttgatccctggagcctctggcccagcgtctcagggtgtctctgtctccattttgttagtttaaggcattgaggaagccagggcaggggagggaaagagctgaaaggagaagaaaaagccgcggtttccaagactggcttgatcactcattttgctgtgtgaccctggacaagtcattagcccactccaggcctcagtttccccatgtataaagagggcagtgttgagctgggtaatctgtgtgaccttagataagccacctaacctggctgtgcctcagttcttccctgtgagaggaggacacccccactcgcctcacaggatcctggaaaggattaagtaacatcaagttcctggcacggttccctgggcacagtaggtgcctatttatgagttccctctctttaagcattcacactggtcttgtgaccccttcttccactcccagggctggggatcctaggagggggagggtcaccctcctttcccggctctctcgacccccaacctccagggccttcctcaagtcaaggagcccaaagaaagctcaaggaggggacccaaggtctgggcccacctggcctacctggctcagggggcgggggctgtaaaccggaaccggtggaggagggggcgctcatcaggaaaggcagcccccactctgcatccgggcagcgccagcagtgccccagcacccccgcagcccgcctctccttggcgccccgctcccctccgcctataaatagcacaggacgtgctcgccgtggcgatgacgcggctgggcaggcggaggggaaggaggcagctctgccagagcggtgggcggcgagcgcggcggcgggaggggtgcggcccctccatgctgggctccgatgacaggggcgactgagtcatcccggggacccacgggccacgactgtccccgccgccagcgtttctgtctccggcttgggggactgcggggacgaggctgacctcggatgggtactgagccctcccagacccccggcacgcccggtctcggagggcacctctgggtgggcaagatcggcctcgacggccctggcgcgcaggagcatgtccgcccctgcgcgactcaggtgcacatggaggcggaaagtgaccgcagccccaagccgtttccctccagcgtccccagacctcctcccactttcctcaggtccccttttggctctccccagaccccaccctcctcgggctgctggaggaaagggatgaggcctgggacccctgccatgttgccgcctgcccagcacccctcctttcagagacggaggaattcttccaccctcagccttgcccctctcagcatccccagaccccactccccacttccctgcccctttccttcctctgtcccagtgagagacacagagcagatgggctgggacaagaaacatttaattaggggtctggggaatcagcaaggccccagacccatcatgcagcctcatgtacagtgggcattgggcccgcccctgggatattgctgggggggggggcctcatggcagcaaacagggcagtgtggcttgagaccccgctttgtgggggagaagtggggcaggggcctttgggtacgagggtctgtgtttctcccactgcatgggagggtgtaactgtgcccaggatgggggtggcatgggctggcacaatcaagggcataagaggaggatctgagcttgggggagggaggttggcaccgagaaaagcagctgtattaagagaggggtcctctctgtgtatgcccaccccaccccatttcctggtggccaaaacagaacattccaccttccttgtctgtcttccaccccctctttttcccagggctctgtgtccagaacaagggagcagataaagccagcaaaggggctcctgcagcacctgccctgtcccctgcagagcctggagagaagcaggagaaaggtcagcccagagggttgggttcctggggcggccgggcaaagcctgggacaggaactgacagtcacaggctcccctggcgggtggttcctgtgtgaccgggggtcctgacagtgaaatgggtttgctttgaccaagcacgggccaggattttgttctcagttgggtttccgtgtgtccaggcagctcttgggtttccttttctttctttctttttttttttttgagacggagtctcgctctgttgcccaggctggggtgcaatggtgcaatctcggctcactgaaacctccgcctcccgggttcaagtgattctcttgcctcagcctctggagtagctggcattacaggcagacccccatcatgcctggctaagtttcgtacttttagtagagacggggtttcaccatgttggccaggctggtcttgaactcctgacctcaggtgatctgcccacctcagcctcccaaagtgctgggattacaggcatgagccaccacacctggccagctcttgggttttctacttgaacagatagtctctgatttgttacaccttccagggacctcagccttcccctcatctgtccgcccaggtttcaagtaacgggagagattcctgcaaaactttcctgagaattgacggaatgacagaggtggagaccaggaggtggactcaggaccttcctatggtcctgggtcccctccccaccaagggtggagggccgaggacacaaaaaggcctgctcccaagaccccacttgcaaaggagcagatgcacggtcacacacacatagacccaagcagaggctctgtggggagaggggtgtgccaggcatgcgcaggtggtgtgggcaggggaaggctgggagaagcagcaaataaattccccaggaatcttccccagggctggactcagcccagcaagtagactggggtgcctgggcgttgggtggacctacctgtagcttcctcattccctcccaccccaccccatccccgccaagtcccagaggatcaacccactcagggcaccccacccaagaaataaaatcttccccagtacaaaaggctcctaagccacggtaagtggcacctaggagagggacagagggaggaagggtatggagtggacaagggggcctgatcccctccctggccagaagcaaggtccaggcatgggcaagggtgtcatctgggttcccttggctcctctcagatctcagtcagggcgtcgactggcaccaggccccgcttcttgccactgctgacgcggatgaagccgtcagcatccttgcttctgcccacgcccacgcagatctgagccagagagacatggagctgaggcctggcatggcctgcagccctggccctgagtcctgcccatggcccccaggggacccaccctgggggatgatgggaccagtgtcagatgtggatggagccctttgctggagtgatgggaccagatcccaggagtgtagaggcctcagcagcaagaccagcacgtcagcagacacccagcagcacttcagggctgaccttggagattagccgctgtactgccctgcctcacccccatcacagaggaggtggagggaaaaggacttgcctcaaattacacaaaaagccagagctagcattcaaacctgagctttagactctgaatccagtgctcctgcgctaacccaagctccctctaatgtcattcagtctcctgtctctgttggtcaccagcccaaattccccagcaggggctggtaggagggccctgcaaccctttctttctaacccgctttcccctcaactgccaagatcagcctcctcctgcagagcatttacccccgcaccgcagcctgtctcccccgcccactccctccctccgccatagggcctgggctgggcctcaggcactcacctggttctccttgaggctcatgtaaccctgttccttgttcccggagaagggttggcagcagcgccaaacattctcgcctggcctcacccgttgcacaaaattagctgggaagaagccaacccggtcgccgatcttgccctggggatgaggttggcaatgaacacccgcgccacaccccacccctgctgcccaccactgctttctccagacccggttcccactcagcaccaatgccatcatcctccagatctagggctctccggattccagcccccagccaggtggcttctgggccaggaatagcataaggtgagcagagggacaaagctgaggcaaggagagtcaaaactgagaggatgtcccaagggttggtcctagttttggctgggaccagtggttggaggagaggttgtctttggggcctggagagaaggtgggggcagtgcccattgggggtgggggctgctggggtgcctaccagtgtccctccactccccaccctgccaagtcaccttccaccagtcctcgttagagtcatccaccagcatgatccgatctccaggcctggggaggacagagctagggttgcatatggagcagggagtagtgcccctccccatcctagcagaccctgggcacctgggggacactgcagtcctcagctgggagagacgattcttttttttttttttttttttttaagatagactctcactctgtcacccaggctggagtgcagaggcacgatcttggctcactgcaacctccaccttccgggttcaagccattctcctgcctcagcctcccgagtaactgggtttacaggcacctgccaccatgcctggctaatttttgtatttttagtacagatggggtttcactatgttggccaggctggtctcgaactcctgacctcaagtgatctgccagcctcagcctcccaaagtgctgggattacaagggtgagccaccgcgccccgctgggagaggattcttgatgccctcagaggacaccatgtgaccacaggtacagcaggcactcgctgggcagcccagtcagagggcgggagacacgacattagcatgagtcactcttagaccctgggcagttccagctcctgtctgggctcagcagcctcaagcatgcaagaaggttcctgaaggcccccctcacactgtgtttcaaggtctgggagcgcagagctgcccagcggggccaggtcacaaagaggacttactgcagagccagatcattgttctcctggggcagaaacttgtagagtgcaacgtaggagtacatgggccccacatccttccgcagggtggctttggggagctgcgggagaatctctgggtcggtgaccggaaagcagcaccctcactccccccactctccactcgctctgagtgtgctaccctgggggctgtgaggggacacagtgagtcctaggtcaacggcagggagaagtgagaccctcgtacatgctatgctcacccaccccaaagcgcactgggacgggaatggagaggggagcccccttctgcctgctgtaccctggggctgcctgcctttgggagagaagaaatgggtgcaatgggcagtgggctgggggtgggagggtaactcctcctgcctcccatgccctctcatcctggcattgcccatccctgaggataagtgaggaagcagtgaatccccacgcaccatgctcttgcccccctatgaatcaatggcaaggagaaattacacccgcttcccaccctgaccttccgggccaatgccagtacaggctcacctgctgtccaggactcttctcctctggtcctggcccttcactctctgctggggctgtgaatactggagatgctaggggcaggagagggaaagggtgagaggcagcagggagcaccctccattgtaccccattcctgcccttgatgcccaccaccactcaccactgtcaccaggcccctcctcagagctgcggatgctgccttccccatcctcggtcagctcatcccgctcactctagggacagagagaggagagggctcagcccccgagcccactgtcatgctcagacacccctccccaaaagaccccccctttttgcccaccataccaggctccttgtcggggactcagaggtgctgctgaaactggagcggttcatcagtgccagggaggtgccatagcgcagggtctcgtagacagggtccaccttcccactgtcccctgcagattatccaccctcaaggcctggctctgcctcaaagccctgcatctctagtcccggctcagcatgccccaggctgagcttcccagctgccccctcacctgtccctcccaggtcttcctcatcccagagatggctctgggtcctcccatggtgcccatgcagaaacttggagcatccttgactcctcactgtcctcactgcccacagccactctgccacctagtcctccctcctagcatccctacaacctatccacatgtctccatcaccactgctagcagtctaattcacatcaccacactctcttggcaactgtcatggcctttcaactggtctccctgcttccactctagccctgccagtccacacagcagccagaaagcttttgtagaaacacacaaattacccttagaagaaagtccaaaaggctaccctaaaatggaccccaaggcctcgtacccatggtctcgttttttctttttttttcgagacggagtctcgctctgccgcccaggctggagtacaatggcacgatcctggcttactgcaacctccgcctcctgggttcaagcaattctcctgcctcagctgggattacaggagcctgacaccacacccagctaatttttttgtatttttagtagagacggggtttcaccatgttggtcaggcttgtctcaaactcctgacactgtgatccgcccgcctcggcctcccaaagtgctgagattacaggtgtgagccaccacacttggcactttgccctttctttaactccctgtccttcctttctcaggcttccctctgccccacaccagtctttccagatcctaaatggatgaacccctcatgcctcatccttcacatctctgggaagtcttccctgattttgcagatgaagacagcgagctttttcttttctcttaatttagagatagggtctcaccatgttgcccaggctggactccaactcctgggctcaagcaatcctcctgcctcagcctcccaagtagctgggattacaggtatgagccaccacacccagctttcagcacacattctatgctctattccttatcttccccacttaaggcgctcatgctgatggtgattgattgatgatttgcatgactgtccatttcagtcctatctcctttactagacaataaattccaccttcttcactactgtgtctcagagtccagcactgtgcctggcacttagtatgtgcttaataaagtgcttgttgaaggaatgatgagtgaatgaatgaatgaaccccaaattcaggacaggaacatccagagaagggaaatggtaggaactgtctgtgccagtgtgactcaggcacccatctcagaaatgttgatttctttctttttttttgagatggagtctcactctgtagcccaggctggagtgcagtggcgtgatcttggctcactgcaacctccgcctcctgggttcaagcaattgagagacggggtttcactgtgttggccaggctggtcagggatgttgatttctcatcccaccacaatgggagcagggactgcggccagggggggcactcaccagtgggtggggactctttgcttgtggcacagactggtggcggctcatgcaccaggagaggggaactgaagttgcggcggaaggaggtggactatggcaagagagggcagagaggttttgaggaggtcatggcctatggagaacttggtccttcccaagcccagggcccaccccacaggaaggagcagccctgagggatactcattctcccatgtgacagtactggcagcactcagctggccatctctgcctgggtccccgctcaccgtcttgcctgggcattgctggtgggagatctcctcagagcaccagaggtggacgctgactttgcacatcttacatcgcaagccctgtttggagtttcctaggaagaatttgggttcagcaattgaggacacccccgtgggcaacaggcaaaggaggggcacattaggggatgaggagagcaggggttgggcattctcatgccagccttgaggcccagcacctacccctcacacagtcagggtatgagggagcacggaagccagagtcgttagtaaacatggcagtgacactgaggcagtgacactgagtatacccccacccttggtggtgctcctctctctgccttgggtaagaggcacagttgggggtgggtgcaatggctcacatctgtaatcccagcactttgggaggctgaggtggatggattgcttgagcccagggtttgaccagcctgagcaacatggcaaaaccccatctctacaaaaaatattttaaaattagctgggcatggtagtgtgtgcctgcagtcccagctactacagaggctgaggcaggaggatcccttgagccagggaagtggaggttgcagtgaaccaagattgcatcactgcactccagcctgggagacagagcaagactctgtctcaaaaaaaaaaagaggcacagaggcacaattagtattggggctcctgaacagcaagagcccaataatattgggcgcaacatgagcccactccccagtacccacgctggcccctccccgtggccgcctcagtgcccaggcacctacctacgatgagctggtggcacagctcacaagggctagctcgcttgaagacatgttcctggaagctgtgcagcctcactggtttgagcgctgccagggggcgtgggactgggcatggggagggggatggggtagccaggcccctgtccgaggctgtgggtggtggggagggagggggcagtggggttgggggcgtcagcagcacctcggtggggcacttgagctcagagcccgagcgaaggaagaagttctccaagctcttacttcggaggatggtcttgagggagagggagcgcttgaatcgctggagctgggagaaaaagagggagctgtgagtgggagcctagagggggctggccagggcgggcttcccttcagggtgtctctggcggtaggggcggcagcagcagcagcagcagcagcgtgggggctgagggccagagcgaaatgaaacagcaacagagaggctccccaggtcccgacgacacttcgcaatctcaggtgccacaaaagccaggtggttgacctccatggagaaaggagttctggccaggtgggcagcaatcaagagccgtggggactgtggcaaactggatggccagggagtagctgcaggtctcctcaagccaattgaggctgttgccaggttttctagtttttcaaaagaaatctagacttttatgtgaaatcggatagaaacaagtttaagtggtttaattccatttttctttgaagaaatggtagtatactatatttcctgtgccttgctttttttcataaacagtaaatcttggaaatcattccatacccatacataaatagattcatcattcttttttatggctacaaagtattttgttgtatgggtgtaccatttactcaagtttagaaaaaaaaaaataggcacggtatggtggctcctgcctataatctcagcactctgagaggctgaggcgggagggaatcgcttgagccaagcagttggagaccagcctgggcaacgtagtatccacctgtgttctcgaacaggctggtggggggtgaggagtggtcgtcctggaccctcatccttgggactgattctccccgacagaaagtctctctagccctcccctccctcccattgactcgtcacctcacagcccttagttcaggccctgatgccccagtctgcttcaaggccacagcctcccctccagccccctgcttccacctgtcctccatacagctgttgcgggggtgatgcctgatcctgctaaaaactcttcctagctcctcgggacaccgtccaaggctctcgccccagccacgagactctccttgcaacttggccaaacctgtccttccaacctgtgcctttgcagcccagaaactcatttctcaattcattgagaattgagaatcctcaattctcaaactcatccatgcttttatgcctctgagcttttgacatgtttgtcctcttctctgcctcactcagttcataccctctttatcctgccaatatgcttccactggtccttcctcctccaggaactctcttctgcaggaattctgtctcatgacccactccctcctctggtgtccactgcatccagcccaacttccaccacagctccactcgggtgatgcttgttatttatttctcactcccccaggagattgtgagccccttggggacggacacagttgctggcttcaaatccccacgcaggctctcaacacatagtaggtgctcaatcagcagcctttggtgaatacatgagccagcggctggactctccttgaagcctacattctggagggcagggtcgattctgcggtgaggccagagctatttccacctctcattcaaacacaccctactgagtcttcccagagagaggtctggaaacctcttgacccagagccttggccgtctcccttcccgttgagaggcggcttacccctgcccactcctttctattagagacagaaacaggggccagcagcctggctccaggcagagggacttggccagggttcccagctggcacgctgggtagcctacgtgccatggctgcctgcctggccaccctgccaaggggatggaagtggtggccccaccagcctccgggaggccagcaggcagcaagacagagggggaagcagaggggatgtttgggcacaaggcaggctctggtgtgccagttgggaggccaaagccctggggtgtctggcacactgaagggctcagtgccttccaaacccagcttcctggatagcactgtgggcttctttgtgtatctatgagaagcaaggccccaggccccagatgcctgggccttggagcataggtagaaggctggagagacaattaatgagaacacaaaactcagcccaggtcaggctctgggccagccaggaccaagtgtggctctgggggcttggatgggccccaagaggcaggtgaaccgtccactgttctgtccagggacctcaggcatggagcacacagggtcgccggaggatgtgctggggctgggggcaaaactaaacctactgcctgaaggcaaatcaccccacttcttctctctgagcctcagtttccccacatccaagagggaagcctagatactcttttttttttttgatggagtctcactctgtcacccaggctggagtgcagtggcacgatctcagctcactgcaacctccacctcctgggttcaagtgattctcctgcctcagcctcccaagtagctgggactacaggctcctgccaccatgcccggctaattttgtatttttaatagaggcggggtttcactgtgttagccatgatggtcttgatctcctgacctcgtgatttgcccgcctcggcctcccaaagtgttgggattacaggcgtgagccactgcacccggcctatcatttttattttttattttacttatttatttatttattttgagacggagtttcactctgtcgcccaggctggagtgcagtggtgcaatcttggctcactgcaagctccgcctcccgggtacacgccattctcctgcctcagcctcccgagtagctaggactacaggcgcccgccaccacgcctggctaattttttgtatttttagtagagacggggtttcaccgtgttaggcaggatggtctcgatctcctgacctcgtgatccgcctgtttcggcctcccaaagtgctaggattacaggcgtgagccaccatgcctgccctcttgtttttatttttttgagacggagtcttgctttgttgcccaggctggagtgcagtggcacggtctcagctcactgtaacctccacctcccaggttcaagcgattctcctgcctcagcctcccaagtagatgggattacaggcgcctgtcaccacacctggctaattttttgtatttttttttagtagagatggggtttcaccgtattggctaggctgctctcgaactcctgacctcatgatccgcccaccttggcctcccaaagtgctgggattacaggcgtcagccaccgcgcctggccaagactggacactctctaaccaataaaaggctctaggtccaaatatccccagaaacttacatctctgaggggctgtcatggtcagaacattggaattgagctagcactttatatgcagcatctcattaatcctgatgctgcccttggaagtagtgataattactgtcccacttttcagatgaggaactgaggcttataagggttaaatcacttacccaggagtcctcagctggtaaacagcagagccaggacttgaaccagcggcttcggctgctgagcccaaagcaccaggagcatcctgctgtgctgagccctgcatgggcctcaccctcgcctctcagctgggccctgcctgggcctcaccctcgcctctcagctgggccctgcctgggccatcaccctcacctctcagctgggccaggggcttgtccacaaggtcaatcagagagtttagggtgagaagggacctggaagactggccacctagagcagtccccaactcatcaccctgcgatggcctggccacatcccgtctcaagagttggtcacctcttgtgatgggaagcaagcagtctcttgggacagtcattccatctttgggcagctccaatggctgcaaagtgcttccccatatagagctgaaacctgcctccctgggattttcgcctatcagccctccttcctcccttggctccagaaagggctactccctctcatacacttcagcccttcaaatatttgaagacaccatcagtcatgttccccccatccccaggcccttgtttccatagtaatcctcataggaggaggttccaagtctccctaccctccaggctgtgtcctttcctggtaccccttggtctcagtgccaagagccacctctgctaggtaccggaggcctctggaacagaatgttcccgggtaccagggcagccccgactctgccggccgactccctggcttggctgtgggccccagatcccaggggggtggagaagcgagaaggaatgacatgccacctggggtggctggcagagatcagactgtggctacaggtctgggttggggcatctctgccaaatgacttgatgcctgaccacttcagagacatcgggcttggctacccaaaccacattttggctcagccaggccaggtattccggctcctggggctcctcattcctggagaggacctttgcccatctcttctccccactatacttttggtgccctcacttccctgggacccattctctggcatggggagaagctgccatgtaccttggcaagtgggcctgcctggtcactcttccctcccaacgcatccagagtttgtccagctaggagcctggaccacaaagtctgttcttctgaatcccctcccagagacagggcctggcctgcctgtttcctccccacctccccatatcctggacggccccttatttcctcaattccccacggcgtctcctgaaagggcatgaggcatctggcagtgggtggtggcagacgtggcacaagctgactcacagcagagatggcatggggtggtcctcccaggggtggcaacaaagggtgatgggcaggccttatgtgataagaagggaaggagaccaagagaggaggaggactcgctaggaaggttgctgggtggcttgggtgcagggctgattcagcctgggggcaagcaggaggctggccagtgattcccagggggcaccaacactgatgaataagcctggaatgttggcatcactgcctgaagggcattggccccctctgttgtacctgcctcacactgagcttggtgggcggcacccaactgtactcttccatctccacccacagtctggagacaggagcttctttgggccaggttgaggtgcaggatggaaggaggctagcaggggtcctgagttctctctctgcccacctctgccctgctgaatacccccgacccaacccacagcccagtctgtgttagtgcagaatccttcacaagagtgatgtataggggaggggcggagggccggggctccagctggcctgacacagaagggccggatcaggggtgtaacccctcccctcccctactccttgaatctccaagctcagacccagaggtgacaacattggagggtccctggcctgggaagagggagaggtacagacctgtggcccttgaccttccctccccacacagctgagcaggcagcttgctggagtactgaggcagcactaccccacactcctgcccgccttccagcactcccacataggaggaggctggagaggacaggccttggtgtgggaaacagggcagggcctgggaggcccccaagcccctggaggcaagcagggggactgtgtatgtctacccaggtgactagagggcaaccgaaatcaggggcattggaactcaggggaggttcagctcctagaccttctgcttgacagaagttgtcacaaatattccaagcaatatcctcccacccaaacatcttagtcctttcccaggagagactgagacttggctctctaaaggggagtcagctctggcctcacagaccagagtctcatttttagaagggggcaagagagagtcaggtgtgcatgtgaagacttgaatgtggagacctgctgggtcccctggtgcaggatgggggctccctggggtgcctctgccagactccaccctgaccctacggcctcctcctccggtcactcccttgatgaccttgaccttgaattaacctcagctcctgcgggatggtcaagatggaagaaggaggaagggggacagtggaaagaagcctagcgaacccaggacgcctccggagcccaggctcccatcatttctggtcctcactgtcccctttcgcctctggagaacaggagcaggatgggaacaaaataccgggtgaagggggagggaggaggtcttggcctgaagtctgggaggtggcagggcgcgcccttggcacagccctttctatcccaaccccaggcccgctcaggttgatcccgcagaaacagaacttctcgcgggccagtcgccagcacctagaacttgggaagggagcagacggattagaggtcgggggagtgctgagtgtgagcggcggcctccccacacccctttcagcgccaggagtctgggctccgcctgccttcgcggggagtaatttattcatggtgactccctcaggagtaacaatcatccataattagggttaatgatgacattcattaattacgatgacttctctttttgcttctacccgctccccctcctctggtcccgctcccgtggtggggcgcggggctgcctgtctttctggtctggagccacaaccgcaggcccccgtcctcgcccgtgaccgacggccggcgctgctgcaggccccctcgcggactccgcagctgcgcacccccggccgcggcctcgcgtccccgagcccaacagggctaggagcggggaatgcaggactgcggaggggcagggagagacgccctgagacgcggagataaacacccggagacgccgggagagacggggagagacgcacacagagacaccaagacacagacacgcaggttgtagagacaaattcagagacacgagcgaggatagaggcgcggactgagcccgggactgggacccggcggccgctggagggtgcgcctcgcacgcacagccgggcgcgtaccccgcccgcaccgctccacgcgcgccctccggcctcgctgcgcccatctctccaacgaagaccagtggccgcctccccagaaggtcgcgatggcgcgcgcgggcgtgcggtgccggtgtgatcgggggctccttgtggcccctcgtcgccaacccactcctacccccgggagcggcgcggagcctcagtggtcacgcgggcctcgcgaccgcgaccctaggacgcccgggcccacaggaggaccccgccgggaagagggcgcccgggcccggggcgcggacaggccttgcgccccccaagttaccttggtttcctggagggcggagacggtccctggggggctgtgggtggccgcgtcatccggttcgttctccttctcgctcatctcggtcatggttcggggagaggggaggagagggtgccgagatccgacggcaggcccaccgcgggcaggctgcgggtggcgggcgtctccgggactctgaagccgttctccagaggctgcccccagttagcccccggcacggcagcccccaacccgcgggagcgggcagagaaagttgccggggtggcgggcgaggggaggccaccacgctgagccgcaggagcgggacgaccccgggcgcgaggaccgagggtctgcagaggatgctgctcgcagcgcggggaggagggaagtggggccgcggggatgagccgagggagggagccaaggagctgtccgtgtccagccggctccgccgtccgctgcgcccgccccccatcccctcccctcccccgccggccccagcccggcacccggcggcccctccgcccagtcctcgccgcccaactttgatttaggaggtcgcctggtcccgccccctgccctacgccgctcccccgcgcagccctgcaaatcaggctctcagctattggctgcctcggtggccaggagggcgaactgggcggagtcttggggggctcgacacgatggggcggggcttggcggggaaagaagcggaggagggagtttcacactgaaaaacccgggatggaggggcgtgaccagattgagggaagcttggggagatcatagtagcgtctggatgggttgcagggaatagaaataggttggggccgcagcaagatagcggagagtgagatcgaagctaggacttccaaagagcgaagattgatagatgccagaggttggtgaaggaagaatggggacccatctgtgccattaattggatgcctttataccctgaaaaggctctctccaaatatacacacaactggactatggtgtatgtgtcaaaggccaggccggacaattcctccttgtgatggaaagccggatgactctatccccttccagtcttggcgtctgaacttcagcagagatgggggctcagtcctcacacccaaagtccccaaacttctctgagacacgctcccctcctaaagatcctaccacaactggagttagatcaggggataatacagagaggtgggggaagaggtcctcaccatcaccttccaaggtgcccctctctccacaataaccttctattttttatttttttatttttttatttagagacagggtttcactctttcacccaggctggagtgcagtggtgcgatcataactcactgcagtctcaaactcctaggctcaagcaatcctcccacctcagcctctctagttgctgggaccacaggcatacgccaccatgcctggctaatttttaaaatttattggtagagacaagtcttgctatgttacacaggatgatctccaactcctgggctcaagcgatcttctcactttggcctcccaacgtattgggattacaggcgtgagccactgtgcccgttcaagatatttccaatatttcttcttctccttctcttcttcttctttttttttttttttttttttttttttttttggagacaggatcttgctctattggccaggctgtagtgcagtggcttgatcacacctcactgtagcctggacctcctgggctcaaccctcccaagtagctgggaccacaggcacatgccactgcacccagctaattttaaaattttttgtagagatggagtctcgctatgttgcccaggctagtcttaaactcctaggctcaagtgaccctcctgcctcagcctcccaaagtgctgggattacaggtgtgaaccaccacacctgaccaagatacctcttctaatgcatgttgattatctgggacccattttctcaggtccccctccctcacctccagccctctttccttctgccccttctggctctgaccagcagatctggcttcctctcttggtctgcccaagaaaagggagatgcactggtggctgagagaacctttccctggtgtgggtggagagacttctgggtttaagtctccctcctcctctgctgtgggtggtaagattgtgggtggggggtgccacatggggggcctgaggtgctgaagggggcccttatgctagcctgaaagttgaggggtggggtgaacacctccaccccccactcacctccccccatgcacacagccattcataggatctctgccctcccaagcacgagctcaccattggagccctgctcaggttaccctgtccaggaatagagatttatttgccagtggcagaagtaggacaagggcacagtgagggttcatggttgtaggggctctgacttcgagatttcctgaggaaggtgggatggagcctgagtgccatcaaatcagtctccccaaaggcctgttcatggccaaccttcccccatctcccactggactgtccttctcactcctgcccagcccaggccagtccagccttccctccctgggcagctcagatgctgggatgcttgcagcattgagacagcaacatcaggccctccacttatcctgggctggaacacacagggccttcttctgagtttggagatcttctgggggaggtgcccctgtctcctcccaaagagcaggggctttgggttccttaggggccagtacctctttggtcactaattaagtgtgtgaccttgggcagataactcaatcttttagagattttgtttgttttgagacggagtctagcttttgttgcccaagttggagtgcaatagcaggacctcggcttaccacaacctccgcctcctggttcaagcgattctcatgcctcagtctcccgagtaggtgggattacaggtgcccgccactacatccagctaattttttgtatttttagtagagagaggtttcaccatgttggccaggctggtctggaactcctgacctcaggtgatccacctgcctcaccctcccaaagtgctgggattacaggcatgagccaccgtgtctggcctatagccttggtttcttcatctgaaaaatagtcatcgtgcctaccccactgctagaatgaatgagatagtgtagagtggcacttagcccagacaagacaggaagacaagacaggaaaatttattttaaaaaaaaaagtgtttattttggtagggatgggggtctcactttgttggcccagcctcattttgaactcctgacctcaagccatcttcctgacttggcctccccgataaagtgctgggattacaggcacacgccaccacgtctagtcaaggaaagtccattatttttcttttttttttttttgagacggagtctcgctctgtcgcccaggctggagtgcagtggtgcaatctcggctcactgcaagctccgcctcccgggttcacgccattctcctgcctcagcctcccaagtagctggtactacaggcgcctgccaccacgcccggctaaatttttatatttttagtacagacggggtttcaccgtgttagtcaggatggtcttgatctcctgacctcatgatctgaccgcctcagcctcccagagtgctgggattacaggcgtgagccaccgtgcccggccattatttttctttccctcctttcttctgggaaatttgtcccttcccagtgctttctctgaggcagagagaagaaaaccgcttccttctctcactttccttggccatttggagcctggtattctgtggggtaaccaacccagaagtggtgattcctggacaaagagatgctaactagatacagagaagaattcccaggggaacccgtagttctggcaaccgaggaaagccagggaagttggaggactgtggggctcatctagtctggacatcagaagcctgaggtggggcaagcatggcggaggcagggggatggatgccatgacctctcgatgtccttcctggcctgcagcctttgtgtttcagagcggtctctcctgaactaagtctgagtcattgctcttagtactgacaactcccactgcagtggatcagagacgaggcggaagcagcctggccagcctctcctgggaaggaaggagcattgccccatctcagattcggagggtagaaacgaggggcaggcagagcgagggccaggtgctgccggggggatgaatggcagccacactctggagggctccctcagaagtggcaatagaactactggggtgcctcttgttgggaaagtgggcagtgggctcttgggagccctgggacagggatgacttcaaatctgcatgcagcacaatgtctagcacatgaagagagaccagtcctcagcccagctctgccttttgcttcctgttttgtgaccttgggcagagagctgtctatctctaaaggtacttgagtttccttcttgtcagactggcagaattggattagattagtttgaaatgaggagttggattaaaatgagggcaataatgatacatctcttagcactcttttgaggattacatgagttaatgtacgtaaagagatggacaggttgggtgaggtggctcatgcctgtaatcccagcacttggggaggccaaggcgggtggatcacctgaggtcaggagtttgagaccagcctggccaacgtggcaaaaccccatctctactaaaaatacaaaaaattagccagatggggtggtgggcacctgtaatcccagctattcgggaggctgaggcaggagaattgcttgaacctgggaggcggagattgcagagagccgagactgcaccactgtactccaacctgggcaacaagggtgaaattcaatctcaaaaaataaaaataaaaaaataaagagatggacagaataaatgcacagtaaatggatgttattttattcatttatttattttgagacaaggtctcacactgctgcccaggctggagtgcagtagcacagtcatggctcactgcagcctctacctccctggctcaagtgatcctcccacctcagcctcccaagtaactgggtctacaggcatgttccactgaactcagcctgttaattctcatgttattattagttactattaattactactaattattattaatagtaatattattattggggatttttaaccttggacttgtgagtgagcttcagggagttcatgaaccactcgaagctgtgtaaaattatggaagataataaacattttctgggcagagttgagctttcagctgctcctcagggcatctgagatccccaaaagattaagagccactggcctatatgacccccagggactctcctctctgagtggctgagattctctgatgtgaggaattgcttctcctcccatggtggtgatctttgcatcaacacctccagtccaagccctttgcatctgtggcctctgccccatgggtcacccaggacagaaaacataagtgactggcctttcccggcagctttagaatcagggtgtctagtgtggaggtgcccaatgtggttgggagctgagtctgggttcctgtctcccagctggggaaaggaagggggtccaagcccagcagggccagggatgcagagaccacagtgagaggcctggccttgccccagcgtcccctgcctccccccaccagcccacctgggggcccgagaggcagataccactctaatgagctaaggctcatggcaggcagcggtaattatgattttatggaaatacagaaggctcttacgcaagtgcctgacatacttcccggctgtggcatctgggacagccaggtccccaggggctggagaaggcccccccacaccccctgctgcctccagcccctggagcttgggacactggcatggagccaccctcccactgcccgtggcactgtccctaactcgccctgggtgagctgttcccgcgctctgcaccccaggcctcctggaggggaacaacatgggctctgtgtatgcaatccctcacgccctcgctcctgctgccccctctccctaccacaaagccaggatctctgggagagttgttctgaagggataatgaggttatagctgtttccttttcctcaatgaagaaaacccctctctcgaggaacacgtcctcttctgttctgtttcttttctccttgaggctggggacacggggctgacagcagccatggtggggtgggggtggggcgtcctagcccttggctgcccctccccagccctgtgccagtttgtctacactgagcccccacccctgtgcttccaacagtgtcctgaagccactgctcctgtcctctagtctattccccttacccacccacaaagcatctgttaccaaggtaacagcaagagcataactttggggtaagcaagggggtggagccctgcggaggaggggcatggttgagggttagaattttggagagatgagcactgtggacccccgaattcttcatggaggatcttttgctggagaggaggccccacgcaggctggggaggggctgtggctgagagcgtatggaaaggagggaggatgaagtctggtcgcagctggattgggtgttagcggtgagggtgcccatggcttactgtgtgggacaagcgtgagtgtggtgatgccgaggagacttcgaggcagaaagattgagcctgcctttaactgctcccttggggttaacgcctggggagagatcctgtggcgggggagtctagacccagctgaagcagcctggggacctgcggctggcctgggcccacactgccccctgcagactgcacagaaagcagcaccggggcagcccaggggttcaggcggggccttggagggtctgcatcggagaccatctaaaccatgaggtcctaccaagtgtatggaatggtcctgagcaccgggggcacctagtacctgcattcgaggcccttctgtagattctgacccagagaggggtaatacagagggccacatcaagctgagctaacgggggccatcgagtggactggaaggcagaggggactagaatatcctaagcagagggaacagcctaggcaaaggctggaggtgtgaaacagaacagccggttccggagctactggaaagcccagagggagagagatggtgagcaccaaaggcaggaaaaagtgaacaaacggccttgagtgctggatcaggaagctagttttctctgcacaaaggggcttctcgaactcattcactggagccctgaagagcaattcagagataccgtggggggcggggcggggcggggagtggggagcaagcaaagtggttcactccaaacttgagagggatttaaagacaaggctctatgttaaacattggtgcaagccttgcatttgactccaagaatatctgtgttagttttcctaccaaaaatatgatttttagcactaaccattgtgtgccatggatagcctggaatatgacccatagttacccagggactccacagcccagcttgaggatggcactgagggtaacaggaggccatggagtgttctccatagaggagtaattgggtaattcctgtgtcttagggaagtctctctggctcccgaggacagcatactagacacagaggaccaagtagtgggctcctagtatccttctggtggccaaagccttcacagtgaaaatagataggaagagccacctcgcctggcccaatatttgtttttaaaaggctgggcatggcttatgcctgtaatggtagcacttcgggaggccgaagtaggaggatcacttgagacaaggagtttgagactagactgggcaacatagtgagagcccatctctacagaaaaattttgtagggccgggcgcggtggctcatgcctgtaatcttagcactttgggaggctgaggccagcagatcatgaggtcgggagtttgagatcagcctggccgatatggtgaaatcccatctctactaaaaatataaaaaattagccaggtgtggtggcacgtgcctgtaatcctagctacttgggaggctgaggcaggagaattgcttgaactcgggaggtggaggttgcagtgagccgagatcacgccactgcacttcagcctgggtgacagagtgagactcaaaaaaaaaaaaaatgtagttagccaggcatggtggctcaagcacatagtcccagctacttgggagtctgaggtaggaggattgcttgagtgtgggaggtcgaggctgcagtgagccatgatcgtgccattacactccaacctgggagacaaaatgagaccctgtctctaagaaaaataaataaaagcccacacatatgtatcctgacgagtggggcatagagcagtaattaagagcagggactagccaggcttggtggattacgcctgtaatcccagcactttgggaggccaaggcaggtggatcacaagtcaggagatcaagaccatcctggctaacacggtgaaaccctgtctctactaaaaatacaaaaaattagctgggcatggtggcaggtgcctgtagtcccagctactcgggaggctgaggcaggagaatggcgtgaacccgggaggtggaggttgcagtgagctgagatcgcgccactgcactctagcctgggtaacagagtgagactctgcctcagaaaaaaaaaaaaaagagcagggactgtgactcagatggcctgggttcaaatcctggctctgtttcctcctagctgtgtgaccctgggctagctacctaacctctctgagtctcagtttccccatctatagaatggggatcaataatagagtaacagaaaaaaaatagtatctactacgtaagaaagtttgaaaagtagtctgaagtcacactgagcactgaagaacagcctactaaagaaacagacctggctgggcgcagtggctcacacctgtaatcccagcacttagggaggccgaggcaggcagatcacctgaggtcaggagttcgagaccagcctgaccaacatggtgaaaccccatctctactgaaaatacaaaaattagccaggtgtggtggcaagtgcctataatcccaggtactggggaggctgaggcaggagaatcgcttgaacctgagatcatgccactgcactccagcctgtgcagcagagccagactccgtctcaaaaaaaaaaaaaagaaaaaaaagaaaaaaagaaacaggcccttggctgggtatagtggctcacacctgtaatcccagcacctgcactttgggaggccagggcaggtggatcacctaaggtcaggagttcaagaccagcctgaccaacatggtgaaaacctgtttctactaaaaatacaaaaattagccaggcattgtggcgggcgcctgtagtcccagctattcaggaggctgaggcacaagaatcgttttacccagaaggtggagggtgcagtgaactgagatcacaccattgcactctagtctgggtaacagagcgagactctgtctcaaaaaaaaaaaaagaaagaaagaaaaagaaacagaccctctatacttagaagtgttatacaaataaacctatatccttaagtgttaaataaacctttgatgtactaggccctggggaaacgatggagtaaaggggaatatttattgagggctcaattattgtctttacttctggggtaaaagctctcatcatcccccttatgcagttgcaacaagaggctcagaaaggttaagtcacttgcccaaggccacacagctgggcttgaactctcagagtccatctcaagaaacatgctctggctgggcgcagtggctcatgcctgtaatcccagcactttgggaggccaaggcgggcagatcacctgaggtcaagagctcgggaccagcccggccaacatggtgaaactctgtctctactaaaaatacaaaaattagctgggcgtggtccatgtgcctgtaatcccagctacccgggaggctgaggcacaagaatcgcttgaacccgggaggcggaggttgctgtgagctgagatcatgccactgcacttcagcctgggcgacagagtgagacttggtctcaaaaaaaaaaaaaaaaaacaaaaagaaggaagaaaagaaaataaacgtgctcttaaccccaacactagtgcacgtctcttagtccctgccctctgggagatttcactctggtgggaaaaaagacattagacaaagtacgcaaaccttcactgcacgttggataattaccatgaaggaccttagtagagcactgcaaagcccagagacagacggggagaacatgagcgtcagctggagggtctgtgggaagggctaagaagcaggcagcaagtctgaaatgtgagcaaagagtcttccccaggagagacttaaggtggtgctagagaggacctcaggtggaaaagactgagggtttgagccagccctactcacggtctaactccagagggcgctgttcagggcagatggtgccctgtaaactgtacccggaggtgccagggacatttagctgggacggggacccttcatctcacttctggggtggagacatttgtgtgcacagatgcacagaccacacagtgattgccatatggtattgtcagctctgtgtgtgtgtgtgtgtgtgtgtgtgtgtgtcctgtaagcgaaaaacatcctacgtgctccagtctacccctttcgtcataattttgcctggaactcaggactcagcccttttgaccacccgcatgcggggagcacggggtgcctgagctctggatagggcaggattctacccacccaggtatcctgagagacagcctggcatacggtaggcactcgagaacagtttgttgaatgaatgaatgaatgaatagacagcttcctctcccagcccatcctttctttgagggaggggcaaacttcactctccagctctccaggttggaaaggtgcctgggaataggaaacaaaacaaaatgttttggctggagtagaaaaaggctccagccctgctcagacaggcacgactccccccaggccagcaccaagctacacagggacccctcctaccctcctctccccgtcttcctgggatcctgctctgccctccccaaggtcttgagggtgcctcccagcctggaatccaactcagggcgtggggtaggtcctcacagccttggggataatgtatggaggggacctcagggcctctggctgcttctttggccctagcagcaggaatgcctccatcaccctgctcccccatcctccccacttggattccatccagactcctgggggaagaaagcccgtgggaccaagtgccaggtgcctggagatgcaggtggcagagcaggggacaggcatctctttggctctgccgccccccaggcaggcccctcagaatctgggagcctgggtagctagagtcccatgagtcagccacattttagtaccccatctctgctctctgccctagttctgtttatatcaaacacagtagtaggaggtgggcagggggctggggctgtctgtgtacagtgacaacatgtgcccagtgtggagaaaaaggcccacccacaggctgactgtatttgtccataaacatggcctgctccaagccccagggcaaggaaggggcaaaaggaccagccccactggagctcctgggctgctctaatggggagccctcctgggcaaacctccctctcctggaagcgccaccccctggagtgtttccacaacaagctgggctgtgttctgtaaactccagtcccctagctaggtagcccccagctaaaggacaggtgtcctgccaccagtgcatgtgtgcgtatgtgtgtgtgtgtgtgtgtgtgtgtgtggtcaggcagaggagggagggagggcagtgggcatcagaggcccttttgcaggtccctgtgacgctgtgtctgcctgtcctgtcccctagagtggacaggcttctcccgtggcgtcaggggaggggccgatcccaggggtctccaggattctgtgtggcttatggatctggggccaatcttgaaacctgagggtgcccctcattgcccctgggcctcttggggaccagtagaggactggacatccatccttgtgactttgttttgctgtaccctccccttcaagttaatgattgctggggagcccttgggacccagatcttgattccccccaacctgggctgcccccacaggtccggagtgtgctagagccctgggtgctcagccaataagaggcccaggccccgccccacccttttgcgggtgtgcttctgtgtataaaggtagaggccccaggtgaggggccagtgggtgcagcccaaccccacgctgagctgtttcacagccggccctgccccctctccaagatgctgttttggcacaaccagccggagcatctatggcccagtcctggggacctataccctgggccccccagcagcctgctcaggtaagggctggatcccccaggtcccggggaaagtgctggtctgaagttggagtggacatcatccatttcaagctgagggaagtggggctcccattcccgggctcctctggagatggggaagtggtcaaatgtacctggagttcagtgtgtcctgggacatctcaaaaacaccctgatcccacttaggacatttttgttgggaatttactcagtatcaggcaagctttgaggttgcaaagacaagtaattgatggcagctgttgagtagaacagccacaaatctgagatcagcaccttcagggaggcctcctggaggcctgaggagctgaatgggggtccctttggccctggctgcagcttggggacctgctacaggaaactgtgggttccccagagggaaggtctggcatagagagtcaaagacctttagaaaaggggatggacagggcagaaagctggcagagccctcctcttcctggcagggagcccctgcccttgccctacttgaagcaggaggagctgcccaacatccctggcacggagctgccctgccccatgttctagtacgtgctctgtgcagccacctcgccagccgtgaagcagcaggaggagaccctcacctacctgaaccagggtatgctaggcctgggagaggggaggagctagtgggcagtgagctcgggaagctgggctcagggtgagctggaggtggtaggtgccactctgcccctcagagtggggctcacgcaaccccttaatccctcccacgccagtcctatgaggtccggatgctctgcagctccaagccgtgtgatgccacccagtgcccccagctgctgaaggtgggtacactcctccccggaagtggcaaaggctgggtatgactgtttctctgggcaagaagccaatgtcatcacagtgatatcatcgtcacggagaaccctctcacgtccgtcatttaattggaccctcacaacagctccgtggtgggcaagaattgaagaaacaggcacagagaagttaagtgttttctcaaggacacagagccagcaagtagcagaactgagatttagaaacacatttacacagtgtaggctggccacagtggctcacgcctgtaatcccagcactttgggaggctgaggcgggcgcatcacctgaggtcaggagttcaagaccagccatggtgaaaccccgtctctactaaaaatgcaaaaattacctgggcatggtggtgcacacctgtaatcccaggtactcgggaggctgaggcatgagaatggcttgaacccaggaagcagagggtgcagtgagcaaagatcgcaccactacactccagcctgagcaacaaagcagactctgtctcaaaaaaataataataataaaaataaaattagaaatatatttacacagtgttattcacacacatgaccttttctcaaaaaattacctatttagcccccattctatgccagaaaatgttccatgagctagggattcatcagtaatgagacagatgtggctcccttcctcaggaggcttgcattctactaagacaaacaagtaattacacatattctgtgaaatgaccaacagtgacatgttgcaaagaaatgggtggcgtgcctagggtgggaaggcattaactccccctttttacagatgaggaaactgaggctcagggtctctagattacttctctggttcacagtcgtgagtggcagatgggcatttgaacacgcattggtgattctaagtcctaatgcctcctggggtaggaagggaggtgtgggaaggtcagcctacacaggtgtgaaaactgggtcctcaatgctggcgtcctctgactgtgcgccacgccctcctgtggctgcagagtgtggtgcaggtgatgttccacgacccgcacctgcagtacacagagcagcagcggcagctggctgggtggaggtggagccgggcccagggaccgcatcctggacatcgatgagtggggaaaggccgggggcccttcgagcctgagctctggctcaggagtccttgtggactgggaaggctgagcctggctccctgcttgccaccctgtgcctgcagatgtgccactgtccgtgggagtgatagaaccccaagtgctgctctcacaactcaacatggtggagtttcactgggacccaacaaagaggacatctctcttcctgcaggtgagcctgaagctgggcctgggaaaaggctggaggtcagaagggggtggcaaccgtgtaggtggaaaaggaaggtgagtttgggcaggggtgaggggaaaataagaatgactctcggccaggtgcgaaaaaaaaggatatatattttttctttgctttttttttttttttttttgagatggagtttcactcttgttgcccaggctgaagcgcaatggcatgatctcggcgcaccacaacctccacctccccgcttcaagcaattctcctacctcagcctcctgagtagctgggattacaggcatgcgccatcatgcccgtctaattttgtatttttagtagagacagggtttctccatgttggtcaggctggtcttgaactctcaacctcaggtgatccacccacctcagcctcccaaagtgctgggattacaagactgacccaccgtgcctgccttaccacttcttagcatggatcttacccaggtcctgtagcctctgtgagccttagtttcctcactctaaagttggactctttcactgtttttcacgggattatgggcaggctactgtgagtactgggtgtgaagagagaagatgctgcttacccttagaatcctggtgccaggccaaacacagaggctgcaggctgctcggggtggcaggcctgaaaggcttcctggagtggattggcagatttagcaaataaaatataggatgctcaaatttgaattttactttatttttatttatatttatttatttatttttgagacagagtcgcccaggctggagtgcaatggcgcggtctgggctcactgctgcaacctctgcctcccaggttcaggtgattctcctgtctcagcctcctgagtagctgggattacagcacaggccaccatgcccagataatttttgtatttttagtagagacagggtttcaccatgttggccaggctggtctcaaactcctgacctcaggtgattctcctgcctcaacctcccaaagttctgggattacaggcatgagccactgttccccattttatttatttattttgaaacagagtgttgctttgttgcccaggctggagtacagtggtgtgatcccaactcactgcaacctctgtctcccagtttcaagtgattctcctgcctcagcctcccaagtagctgggattacaggagcatgccaccatacccagctaatttttgtattttagtagagagatggggggtcttatcatgttggccaggctggtcttgaactcctgacctcaagtgaactgcccgcctcagcctcccaaagtgctgggattacaggcgtgagccactgcacccagcattattattttaaattattgttttttttatatagagagggtctcactctgtcacctagactggagtacagtgatgcaatcatagctcactgcagcctggaactcctgggtataggcaatcctcctgcctcagcctcccgagtaactgggactataggcatgtgccactaggcccagctaattcttaaatttttttgtagaggtgaggtctcactctgttgcccaggctggcctcaaactcccggcccaaagcgatcctcttgcctctgtctcctgctgtgtgctgggattataggtgtgagccaccacaccagccaaatttaaattttaaatgttttttaaaacaaagtctcttgaacccaggaggcagagcttgcagtgagccgagattgcaccactgcactccagcctgggcgacagagggagactccgtctcaaaaaaaaaaagaaaaaaaaaatttttttagtataagtatattccatgcaatagttgagatacacttacactaaaaattatttgttgttcatctgagattcaaactttactaggcatcctgtattttatctggccgctcaactacccttgaaggggatgtcttagctcagatgtgagtaggggagctttctgggtagaggcctctggggaaaactgcaggtgtgttggggtcctgattagggaggcagggtgggtcagtgggttcactgacggatgagaaagagcagccgtgcagcaatgcttgacttgactctttaaggtgatccaataccagggttaggaactttgcttctggtctcacaaccatggggagccattgaaggattttgaccaagggaaagaacgtagtaaagtgatgctttaagaatggaaacttggggccgggtgcgctggctcacgcctgtaatcccagcactttgggaggccgaggcgggtggatcacgacacaaggtcaggagatcaagaccatcctggctaacacggtgaaactccgtctctactaaaaatacaaaaaattagccgggcgtagtggtgggcgcctgtagtcccagctacttgggaggccgaggctggagaatggtgtgaacttgggaggcggagcttgcagtgaaccagcctgaccaacatggagaaaccgtctctactaaaaatacaaaattagctgggtgtggtggcacatgcctgtaatcccagctactcgggagactgaggcaggagaattgcttgaacccgggaggtagaggttgctgtgagccgagatcacgccattgcactccagcctgggcaaaaaaaaaagaatggaagcttggccgggagctatggttcatgacagtaatcccagcactttgggaggccgaggcggggggatcacttgaggtcatgagtttgagaccagcctggccaacatgatgaaacccccatctctactaaaaatacaaaaattagctgggcatggtggcatgcgccggtagtcccagctattccagaggctgaggcaagagaatcgcttgaacctgagaggcggaggttgcagtgagccaagatcacaccattgcactccagcctgggtgacagagcaagaccccgtctcaaaaaataaaatagaatggacactggttggggatggaaagttgctgtcgtagtatgtggctgacaggtggcaggcgggtaacgggttttgggtggactcccttgcatgtgggtggatctggagtcgccctgttttctctgtttcttctccatctcagttcacacctcggaagaaaggtggagagaaaggcatccctttccgcctccagatcgacaccttcaggcccagtgacaaggggctgccgctagaccacctgcactcagctggctgcctcatcaaggtgtttaaggtacaggcagcaatggggcccattttcctctctctcagggctgtcacctggcctcgccggctgtgtgggttctggccccacgttgctgtggatcctcagcctgctgtgccccatctcttggactgtttccttttctgtacacagagggatggggcttggtctctgtctcacagccaatccaacagagccactgaagagaggcaggcaggtaaagaaagagtctttgggccgggcgcggtggctcacgcctgtaatcccagcactttgggaggctgaggtaggtggatcacaaggtcaagaggtcgagacaagcctggccaatagggtgaaaccccatctctactaaaaatacaaaaattagccgggcgtggtggcacgagcctgtaatcccagctactcgggaggctgaggcaggagaatcgcttgaactcaggaggcggaggttgcggtgagctgagatcgcgccactgcactctaacctgcacaacggagcgagactgcagctcaaaaaaaaaaaaaaaaaaaaaaagaaaagaaaggagcctgaggctttcctcatcatcctcctgcagcacaaaggagcggaaactgaaaatggaccgtgagaagatggagaaacagcccctgcatgagagggacaagtatcagaccgcctgcgagagcactgtcttcttggaggtgtgtgtgttggggcgagagcaggaggggagagttggagaaaagatcctcacggtacagatggggaaatggaggcctccagggctctgactgctgcaagcccatcacagccccctggggactccaccacttcctgcaaaggacactctctgccctgtctgtggttgttgaagcttccaggagctgacgccctccaggctgcctgtcctacgcgggccatcgccacctccttccttgtgtgctccctctgcctggccccctcctcctcctgctgctcctcctggccagctcctccaaggcccttcctcactgccccaggcccgccgggtggttaacttcttccttcctgtggaaacccagtccacttgtcaggcccctggtcagctcttaatatacaggtggagagaagggagcaatgaccagccttgctgtgtgtttgcctgcagtgttcgccatggccggagtcccctgcaaggccccggccacctctcagctctctggctctgacctctccccactcctgcaggctcttgtccccagaaaggtgaggcaggatgagcacctcctgtcagccctttggggtgagagtgaagaaaagagctcccagcccaggcatggagcaaagggcagggctggggattggtggggaatttgtggggtgaggacaggagcaagctctgtgtcccagggcaggcctggaggaagggtgttggtggagggagactggctgtaatgctccgcagagttcttgaacctttgctcctcctcataggctctgttcctcaccaccattcgctctggataccttggggtgtagcccagttgaggtgagccttccccttcccactctccactgtcccaaagccttctccgcagcttcatctcaagctccagaatggagtggccctgccccctggtggccagatgtgatatggccatagattgtaacttacctgataagactgggcaggaagagcctcccttctcagacttgggacctcccaagggaggggctgtttccctttcttgttctgtccctgggtcctggtattacctggaccatccattttatacctcaggatctgaaccaaaaagcccccatctcagagacacagcaatggttgcatcagcactggttctccagctactgccggatgctggccaacttcactggtgaggctagtgtctggcaggagccagacctgtaggggactgagagtgggtgggacacacaggcaggaagcctgtctctgtcctggcttgttgtgggcccttcaactaacatttactggggactaagagttgcccagcattgtgctaggctctcgtctcacgaattatcccatataatttatacactattccttgaggacagtgcccagagaggttaaataacttgcccaaggacacacagctaacaagtggcagaactggcatttaaatccaagcctgactcccatatctgagcacactagggctatttgtagactaatagactgtgtcccttacttcccacccttgatcccaggcctctttcctcagtctggccctgtctgactctacaggtctggatctgctgaagcttacatgccaggaccttatccaaatctgcggggctgctgatgggatccgccttttcaatactcttagagccaggtgctggacactgccaaccagggtccccttcccactgtagtggcccttactaacttagctagcaggtatgtttcatacaattttttttttaatatggagtttcactcttgttgcccaggctggaatgcaatggcgcaatcttggctcactgcaacctctgcctcaggttcaagtgattatcctgcctcagcctcctgagtagctgggattacaggcgtctgccaccatgcctggccaattttttttttttttttttttttgagacggagtcttttgcccaggccggactgcagtggcactatctcggctcactgcaagctccgcctcctgggttcacgccattttcctgcctcagcctcccgagtagctgggactacaggcgcctgccaccgcgcccgtctaattttttgtatttttagtagagacggggtttcaccacgttcgtcaggctggtcttgaactcctgacctcaggtgatccacctgctttggcctcccaaagtgctgggattacaggagtgagccactgcacccggctcatacaatgtttaagccagaagtcaccttaaagaccacttagtcccactccctctttttacagaagaaactcaggcccaagaaggacagtgaccagtctgaggtcacaacccaaagctggcagggctggggtgaaaagctaggctcctgtgacctccttctgtggccatcccacctgcctcattccatttctggggatagagatgtctgtggggttttttcctccccattttttctccccctagtgtccagcattcgttaaatacctaagaactacttagtgacctccctccctcgagacctgggaggaggctgggatctctcctaggatgggggctagaagtgggagctgttagttcaggtataagactgatacatagactgttttcctggcccaggcccatctgtcaccaactgactttgtatgtggctcaggagacctctaggcaagggaacgaggttcctaagaaccctgactcaggtgaggttctggcctctctctccagaacataggaaattcaggtgtagctgcatgaaacctctccctagaagaggaatggtgataccccaccattcctgggacccaggatgcccttcttggcatttccctaccttccatgaccagattagtccctctccttccagaatgtctccttgggtttattcaccatgttctactcctccaccccacctgatcgtcactgcattagcatatgggattagaacatcatcttgttatgtacttgggtcccagtcactaatatgtgggtgtcctgtctttaaactgggggttcccctcagacacctcccaaaagatgagggatgagaggtgaagtagacttttttcttttttttttttttttgagacggagtctcactctgttgcccaggctggagtgcagtggcgcgatctcagctcactgcaacttctgccacccaggttcaagagattctcctgcctcagcctcccaagtagttgggattacaggagcctgccaccatgcccagctaatttttgtagtttttagtagagatggggtttcaccatcttggccaggctggtcttgaactcctgacctcgtgatccacccctcggcctcccaaagtgctgggattacaggcatgagccaccacacccagccaacttttccctctttacttctcctccccccaccccatagccatcttcctggcacccctggtttcctgtgggcacatctctggactcccttcccctgctgacccctgcctctgtgttgcccatgcccccagacttttatcaagagatctctctggatgaactcagtgctgtagagctgatggggaaactggctgagctctggccatcccagccaatcagatccatcaccttttccaccagggcaccgggggcatcttcattctcctcagtgaccagataaagggcagccatttcctgtcgcaaatccccacggaggcctcgctaacacttctgcctcagattaagctttcttttccatggcatggcttgttctctttggctccaataacaaaattgcctttgtgcccgcttcactcttacaggtggtccagaattttaaggacgaatcatactttgtggctgtggtgaaaaaagggattttagaggcagaggagtgtgcctggctggccctataaagggggataagagtgtgctgagcatatattccgtctcctaaatgagactaaaaggctctttgggggccaggcgcagtggctcatgcctgtaatcccagcactttgggaggctgaggcaggtggatcacttgaggacaggaattcaaaaccagcctggccaacatggcaaaaccccatctctataaaaaatacaaaaaactacccgggcgtgctggcacgtgcccgtggtcccagctacttgggaggctgaggcaggagaatcccttgaacccaggaggcagaggttgcagtgaaccgagattgccccactgcactccagcctgggtgacagagcgagtctgtctcaaacgtctcaaaaacaaacaaacaaacaaaaaacctctttgaaggggattaaggggatgtgtcccaattaactagcaaacacctgtgaatgccagctttgtgtcaaggggagagggatttgtatagctaaaagatatttattgcttaggaaaaacatgactgaataaatgcatcctcattaaataaaaaatgctccagtttctgttgtcagggagtttattagagggaaaggtaaggcccccacttttctccacctgcccctggcatgatacaaggcagaagggcaggtgcttcctggacatcatctggcatagggcacctctgactagtctgcttggcatctggttattcagatgtttgccttccacccctccacatgccagagctggtcagcttggcttatgtacacaagggggtaggaagaggtagatgtgaagtcgggttttaagacacgtgtggccgggcgtggtggctcacacctgtaaccccagcactttgggaggccgaggtgggcagatcatgaggtcaggagttcaagaccagcctggccaaaatggtggaaccccatctctactaaaaatacaaaaattagccaggcgtggtggcgggcacttgtaatcccagctcctcgggaggctgaggcaggagaatcgctggaacccgggaggtggaggttgcagtgaactatcgtgctactgcactccagcctgggtgacgagcgaaacttcacctcaaaaaaagaaataaaacaaaaaaacacttgggtgtgccagacgcattgtaggctgcttggagggtgaggacctgactggtcctgctggtgcctttttactgctttcggtgcagaatccagatggctactacttggttctgacctaggccaggggaactccactgctcaagagactgatagcttgtcttcaccagaaaccttgttaaaacacttggctgactcaacaggctccaggtgagccaaagtatcttgcatctcaccccgagaggaggcaagtagcctccagcttcacttttctttctggtcagcagcaatggctgttggaagtcttccttacccattcgttcttctgagctggccaagtttatgaggcaaaaaaaaaaaaaaaaaaactggcaatgtggaaagagcttttgccatgagcagtgttggctggtgatcactgagagtgttaattcatttaaaaattttaagccctttttaaattaaaagttaatttttaaaaggtatatacacttaatgtgttgtccaatgtgttgaacatttaatgtggtgttcagttttcttggctttattgtccccaaggggaaatgtcttctgcttaaactataaactagggcaaaggatggggtctggaacaagggaataaatcaatccagctggatctttttttcacaattagtttgggcaaaactaattactaaagcctccaaaagaccattcaatattcaaatcactgtacctactaaaaaactcagttctaagagatttaggaaatactatagctattatctagaattgaggctatggggcttttagaaaaaaaaatttagacatattgtttccttagttttaagagatgaggtctctgttgtccagactggtcttgaactcttggtgtcaagtgatccttccatctaaactctcagtagctgggattataggtgtgcaccactgtgcttgactttttttttttttttaccttaaattttattaatctttccctaaagtcataaatttaattttttttttttttttgagatgggagtcttgctctgatgcccagaggtagagtgcaatggtgcaatcaatctgggctcactgcaacctccacctctaggattcaagcaattctcctgcctcagcttcccgcatagctgggattacatgcttgcaccaccacgcccagctaatttttgcatttttggtagagatgagtttcatcacgttggccaggctggtctcaaactcctgacatcgtgatccgcctgcctcagcctcccaaagtgctggggttacaggcgtgagccaccgtgcctggcctacttttttttttttttaatttataaagaaaagaggctcttttttggccgggcgtggtggcttacacctgtagttccagcactttgggaggctgaggtgggcggatcaccagtggtcgggagttcgagatcagcctagctaacatggtgaaaccctgtctctataaaatatacaaaattagctgggcatggtggtgtgtgcctgtaatcccagctatttgagaggctgaggcaggagaatctcttgaacccgggaggcagaggttgcagtgagccccggggttggtctccaaaagaaaaaaaaaaaggtttgactcagttttgcttttcacgtttaggtcagtaaccaactgaaattgatttttgtgtatcttgcaggtaggaatctagtcctctttttccatacagaaaaccacttttttttttttttttttttcctgagatggagtttcgctcttttgcccaggctggagtgaagtggtgaagtggcacgatctcagttaccgcaccaggcccagaaaaccacttttatattaaacagtaaacgctttcttaaaagacaaatggtatcaggtcatatcttaactgtttttttccattctccctcccttaaagttttattacgaaaatcttcaaatatacagaaaagtatatttgatgatttccaaatgcacaaagtggaagacaagtcatttttaagagacaagtgccctcttaaaaattcttgcataagcccgggcttggtggctcacgcctgtaatcttcagcactttgggaggctgagtcaggcagatcacttgaggtcaagagtcaagaccgcctggccaatatggtgaaatcccatctctactaaaaatacaaaaaaaccatagccaggccgggcacggcggctcacgcctgtaatcccagcactttgggaggccgaggtgggcggatcacgaggtcagcagatcaagaccatcctggctaacacggtgaaaccctgtctctactaaaagtacaaaaatgagctggtcgtggtggtgggcacctgtaatccctgctacttgggaagctgaggcaggagaatggcttgaacccgggaggcagaggttgcagtgagccaagatcacgccactgcactccagcctggtgacagagcaagactgtcaaaaacaacaacaacaacaacaacaacaaccaaaaaacatagctgggcctggtggcacacgcctgtaatcccagctactcgggaggctgaggcaggagaactggttgaacccaggaggtggggttacagtgagctgagattgtgccactgcactccagcctgggccacaagagagagattccatttcaaaaacaacaacaacaaaacaaaacacaaaaaccttgcataattatttgctgataatttacctacggtattatttactaatcatctttgatgagacttgaaccaggtagcctctgctagggagggtgggaaggaagaaggctctgagatgataaccaatggatggggtaaagggaagtctgtttaatatttacttaaaagttaatatggacaactgagcagacactgcttgcatccctggaagggactgtgttgggacttatctagaccaggtctttatgcagaataaacagatgtaaagtggggcctttgattccacagggctccccaagggtgcttcatggcaaggtagatagagatttaaatttagtttgctgagttggctctactgctcatctctaccaaaacaatagggaccctgttgcatttatgtttgtgtatctttaagccctagaggcctctagcacaagactaggtattgaaatattagttgagataaagggaataaaagcagccaacacatgagtgtttactatgtaccattatctcatttaatctttacaactctataaagtagatactgttatccccatcttaccaatggagaactgagaaaggggggttaattggctgaggtcatacaagataaatggtataggtttgacctcaggcaatctgactttcgagcttgtgtgtttaaccattacactactccatcttcactccttcatagtcaaggtaagggcaatgaatgctctgcagagagaagggacttggcttgaattttatccatcaaattaactaaggcaactcatttacattatgtcttccatgtttctcgaggacaagtgaagctcagggtattaaataatggctgttaaaaaagtattaaacggaggttattaaatgagtaaatgagtattaaataaaggctattaaaaagtattcaaaaatataaggatgccaaaaggaagtcccttcattcagcctcacgagtagttctagggttcaaggaagttaagaatcactgctcaaagtcaggctatttccacaggaaaatgaaaagtcttcacagcttactttctttaattacatcataaaacaaaattagaacatacaagaaacaataatagttacataacaatttactttatatatttatatataaaaaactttttttttttttttttagtccaaagatttttaaagcaaaaggaatcctctactgccacctcggattttatttattttaaataatccccctccccccatcctcaagcgccaaaagtactgggtggaaacagtcacttggagagctaatggaacctggtgctaagtcaccccgtaggcaactgtgtcggctccagagattggctaagcatttggagcaggcctagtggagaaacaagcaagcagcagctctcacacactgcagcactccagggtaggccctaaggcttgggaaggagggaatcagacccttcaggtcaaccacctctgcattttaccccctcaggggagtgagtgggggtgcggggtgcagggatgaaacagagcctggtatgaagataaaaatgtctccaacagcaccatttacccatccatctctgtccctgagcagagtctgacaggcatgggtagtcctcacagttctctgagctctgcacaggccacattattcggatctgtactctcagggtcacgggaaggtgggcaaaggtgagcagagcagctgagaagtgcacatggtaggttacctggaaacaattcctaggagaaaaaaggaggaggccagagtaggaagcatctgaaggccaagtcataaaacaggaatggagaaaaacaaaattaagaaatgcaaaattaagaaggccgctctcctcttacagtcaacctttggagtgggtagtcacagatactcagggctccaagagccacaccatggtgagaaaggacatgggtagcttctgaggagcatggtctcgtggatcttgtgtatgtgccaacaggctgtaagggttagaagttagtgtgtaatttggaagtagggtgaggaggggagtgagaagaaatcaaaagctcatcccttcctgcactattagaaattaacagtcatcagagaagcacagataaattattcttaagggcaggaaaaaactaatgtaaacccaggaaagcagcagcaaaggtttcacttactaaaaatctattatataggaaagaaaattatttgtccacaggggaaaaaagtaatcaaatcatgccagttagagactttttcaagttaagattttctaagaccttaggttttcattctctagtgccataaaaaaggaaaagaaaaaaaaagagtagaataatgacttcaaggcctgagaaggttcaggctaaggtaagaaacatatatgtgtgagcagcaatgaggtacagatctgaattaatgagataatggcaagagaaacttagtgaagcaaagttttcttttcttttctcttttttgtgagatggagtctcactccgttgcccaggctggagtgcagtggcgtgatctcggctcactgcaacatccgcctcccaggttcaagtgattctcttgcctcagcctcccaagtagctgggattttgtattttcagtagagatggggtttcaccatgttggccaggctgttctcaaactcctgacactttgtgatccgcccgcctcggcctcccaaagtgctgggattacaggcgtgagccaccacgcctggctgcaaagttttcttcttccaatttaacaaaaaagacgtcacttcaaagatgatccttggttcttggggcatgacagaagagaaaaggtaaatatgtctggacacctctcttctcccatctcttcctagggtaaggactgtcatttactgctcacttctctagtcctagtaccaaaaccatgcccagatgcagctggggtgcacttgtggttctttcggtggtgccaaaacctatctgtttgactggttaagtgtgtagaaagtaggagccctctttgccagtaaaaaggggtgcagttgatcagagaggaaagtaaatgtacccatgtgtgacacagccatcactatgtattcaagacagatgctgtacctgaggcaaagtaccccaattctagagctaattatctgctttatttgaaacttgtctatcattttaccatgccgattcttcaaaataagactataaaacataaaacagaaaggactattgataggattttgcttgttcatggttctttgtaaaacagcaataaaccaccctggctgaggaagcactgagactcaacctctataaactgaacttcacaagcacttatttaaaaacaagaggcagagatggaagaagcgcatatggactttctcttaacatcccacaggggagcttgccctaattctttttctcctgaaaattaactctcttgggctccaaagatcaactcagcttcacctaagaggttatgtactgaccttcctaacgatcaaaggcttcagagacactgaattgatgcgtctaaaaaaaatagatacaacgggccgggcgcggtggctcacgcctgtaatcccagcactttgggaggccgaggcgggtggatcatgaggtcaggagatcgagaccatcctggctaacagggtgaaaccccgtctctactaaaaatacaaaaaattagccgggcgtggtggcgggagcctgtagtcccagctacttgggaggctgaggcaggagaatggcgtgaacctgggaggtggagcttgcagtgagccgagatcacgccactgcactccagcctgggaaacagagcgagactctgtctcaaaaataaataaataaataaatacaacaggtagatgtgacttgagggggaagctgcagaagcccatcatgcaagaaactcacttgcctcttatggtactttcaggcaggtagaatgtttatcctgggctgggcgcagtggctcacgcctgtaatcctagcatgttgggaggctgaggtgggcagatcacctgaggttgggagtttgaaaccagcctgaccaacatggtgaaaccccgtctctactaaaaatacaaattttgccgggcgtggtggcacaggctgtaattccagctactcgggaggctaagggaggagaatcgcttgaacccaagaggcggaggttgcggtgagccgagatctcactattgcactccagcctgggcaacaagaaaaaaaaaaaaagtttatcccaagtgagaaggcaaggttagtaacctagtaacctatgttctttgctggagaatcaaaatgtcaagttagggcactcggatacaacccaattttattcctaaactacctgggctaattataccctactggtatgattttatacagctctctgtatcttccaatcttacatttaaaatttatgatagaaactggccaggtgcggtggcttacacctgtaatcccagcactttgggaggccaaggcaggtggaccacttgaggtcagaagttcgagactagcctggccaacatggcaaaaccccatctctatgaaaaatacaaacattagctgggcgtggtggtgggcacctgtaatcctggcctcttgggaggctgaaacagaagaatcacttgaacccaggaggcagaggttgcagtgaactgagattgtgccatggcactccaacctgggtgacagagcgagactccatgtcaaaaaaaaaaaaaaaaaaaagaaatataggcgaggaaaggctgtgactccatttttccccattatccttttactgctttagaattctttggtacaacatcattaatggggagagaggttctgtctcaagaattccaaccaaacatcctacatttcttctcaaacaggacttggctaattcacagtgcctgggtttgaggtggctaaagattctaggattggcaggcagatagagaggcaatctttttgtaaaatgcttcagagctcaaacatatgattgagaaagtctgtcagccaggagatacaaccaggataaaagcctacccttaaatcatacacataaggaggaataaggcaaaatagagcaatttcctttaaacccctcctctcactggtagcaactggcatgagccgcctgtgactttcagcacaataaacataaaatggccaagggtcacccatgacccatgagtgctcttctcccaacaacacagtcacctaaggacatgctgactaaacaagcaggcaggaagccactctcttctttccagtgacactctcacactttctaacaacttcaaaccaagacaggtttcatcacatattttgtttagtcccccatggcattagtgggctatcaaactagtaacgatgcatttttttctttctttctttctttttttttgagatagtctcactctgtcgcccagggtggagtgcagtggtgcgatctcagctcactgcaacctccacctcccgggttcaagcaattctctgcctcagcctcccgagtagctgggattacaggcacctgccaccacacctggctaatttttgtattttcagtagagacagcatttcaccatcttggccaggctgttcttgaactcctgaccttgtgatccacccaccgtgccgggccataacaatgcattttacaaggcaattagaagtaataaaagaatgtcgctactaaaacattatggctatcttgaataactcaaatagtctggaaagcccaaaatgaagcatcataaatttactaggtttccctataaaatgtttgatacaagggatatgtgaaacttctgacttacatgtctgctaaatcaacttaatgaatgtggaaatcagactagaaatttgcaaaagctacttaaggaatacttttaccttcagtaaagacaagagcagaataggagaagaaaacattttttacacaaagcacaatatgctttcatattccaaatattggaaaaagggctaaggccatatccctttcttcctcatatccaacagtttgcttttaaactgaattcaaattcagtatgcaaacaccaaagaccacccaatgaaaaatggcctgagccacctaacagtcactgaactttaaggctgcctttgacagcccctggagtaggagaaggattcaaaaaggaagctagacttgagacatctgagagtaaatcagcagcattactgagggtgagatggaggctttaaatagagggaaaggatgggtgtgggaaggaaatggtggaaatcagtgcaaaaataagctggagtcagctcaatggggctgatgaagaggatgaaaagacattgatgtagcaaatgatgctggaagatgtaaggtatgagattaggggaaaaactgcttagaaaagagatgatttggatgttcaagaactttctccagagacactacagtaattcctccttgcccacctgtaggtttacggcagtagttttgagggtaccttctaacttatccccaaatctcttctctctgttcactgtttttttccattataaaaggcatattttggagtggctatgaggttagacaaacagatcaattagcttttcctgtaaagaatttttcctacattaagccttactgaattttcaaaagtatcccagatgttgagagaggaagcattatgttcagatgtcaggctcctttccacctgaccaaaacttaccatgctttgtgttctctcaaagtcctagcatattcatcagctggtgtaggctgcaaatcagcataaaaaaatgtatttccttccaagcttgataggcctgaagttttcttgagaaaggaacaaggcttctgcctgacaacatacaagccagtgctgcacatctctgagtcttcattctctctcacttgactctgttcttggcacaaacaggctggaatttgccttaatagcagagatcaccagagcaagtccccatggacctgcctgtgggtatatcctttgagcagagaaacagcatttccaagatcatcatgaactgatgaatagagtcttttaaacttatcttttaagtaaagaagtaccttaatagcctcaacttaggcaactcaaatccacactcactaatcaatctgggttttatggtcaatttgtacaggcactaaaacaacaacaaaacaccttaaactttaaagcagatggcccctaaatagttctctcctttagttttgtttgagtaacctagggatctgaatattattaaccacatctggaagtatgtgtgtatgcacgtatgtatttttatgtgtaggggtacagacaagaaactgagtttcatgttaaaaactatattccttataaggtaatctgaaagagaataaggggaaaggggaatgaataaacaagtaatctgcgtttttaaagcggcacaataaaacaggatttaaaataaatttaatatgataaatattaatggatagtatagacttctaagaccctttcatccaattgccttctaaatcaatggataaataaatcagactttattcttatatatgctggtataatcagcaactgcagcattaaaacaaacctcttaagctgggtacagtggcacacacctgtagtcccagctacttgggaggctgaggtgggaggaaggcttgagcccaggagtttgagtccaggctgggcaagatagcgagaccccatctctaaaaaaataaaataaaataaaataaataaataaaacaagccttttaatagtctggatcatatagaagattaatattatgatggattgcacattaatgtctcaaaggacaccccccgccaaaatcaccctactaaaaatcacactgggtttctaatcttggggtttagaaattttcttcttatgctttaaaaactcattttacttcctttatcctctgattttttgggaagacagagggtgcttcttcttggactcttgagtcctggacactaaattcctccctcagttctagtgcccaggctaagcagagacactaaaccccttacttcctctcagtgttctctttcagctgcctcaatgcttcacctggctacattcatacttcattcagaagtctgaacagggccgggcatggtggctcatgcctgtagtcccagcactttgggaggctgaggcaggtggatcatttgaggtcaggagttcaagaccaggctggccaacatgtgaaaccccatctctactaaaaatacaaaaattagccaggcagtagtggtgcatgcctgtaatcccagctactcggtaggctgaggcaagagaatcgcttgagcctgggaagtggaggttgcggtgagccgagatcgcaccactgcactccagtctgggcaagagtgagaacccgtcttaaaaaaaaaaaaaaaaaaaaaaaaagactggggcagaaaagagagatgactgacaggttatgggaaggttctggccctttggggtgccaacactagatatgaatccattaacactgacatacaattgaccagctgttatagagccattcttgtatccctgaaaggctgaaatgggggaaaagagagaaacagactggctagaatacacagctcctctagtggcattcctgttaaaacaacctcataggtcagagatgccactgatcactcctagatttcagtaaatatataataacattaatcattaatgtctgaacttgggtgttggggactttcaggctctgttttgtgatttatcattttcactctttcctaataatacatctctctctttccttatgatacagttggtggagtctgacagaaggaagaatatgtagggggaatattggggataccatgcgaattatcacatatcagaagataaaatagaaaccaaaaggtagcatctgttttcatcaaaacagtttcttctcataacttttcttgctttcattagagtttccttgcaggttggcaaagattcaggcagggtcccctaatggtaaaatttagaattaaaaaaatatttattgataatatctttttaaaaaatgtttggtaatcccaactaatcattcaaaatgcaaactgtaaacacgacaacagcaaaagggtaacaattgagtgagtaagcagactgaacaggtgacagactgagcaagagtgtgggggggagcaacagagaatgtaagacaggtgcacaagtgtgctacagacagtgataatttgagtgtgtaagaattacatttggaccacagtgatttcaaggcaaccatttaggaaacctctgggccaaatactaaaacacaggaggaatggacgagccttctttgtgagcatgctcagcatgttggcatggaaacaaggaagcatagaagctctttagtcacaatgaatgtctaccatttctaagatgcaaagaaattttctttctggtccctgggtacatcatatattgtctttccatgcttttcttgaccccggaggacagcagatgctgttctaaaatccccaaagaaacccctagacaaaaatttaaaaaccacagtagcattaacacggggtttgctggaatgcccctccctatcttggcctatgattttcttatgggcacctcaacaggaatggttaaattttaccaatctacttgataaaaaagccatcacaaacttcagtcccatggtcacaaagctagagtggatgggggtaagggtgtgtatgtgtatgtatgtgtggctctggggatctggacactgccctccctcactttgtaacccttgctcagaacactggggttgcttccactggagagactccacggtagctctagaagtgtcattaaatactcagttcgccaaggttgaccacctccattgtcataggatgatgcagcatctgcagaagcgctgtctgctgccccctactgatgggggtggagtgacaggtgcgaagtaggcgtggactttaatattgggtaaatgggtctgaaacaagacagaaacattaaacgtttaagagagggcttaaacagaaagagcaatgttggttcttagaaaaactaccgaggggctcaatgaacataaaagcagggcaaaggctgagcactggtcaggatgttagagggcctgggttctactttgttccatcctaggttgttctcaatgaccagaacaactcatatgactttggtacctgtttgtgtaataataaaactgagggccgggcgcggtggctcacgcctgtaatccctgcactttgggaagccgagacgggcggatcacgaggtcaggagattgagaccatccaggctaacatggtgaaaccccgtttctactaaaaatacaaaggctaatttttgtattgttagtagagacggggtttcaccatgttggccagactggtctcgaactcctgacctcaagtggtccgcccaaggatgggagatggaagagactcctggcagccaggcagtctaggaaccctaatgtaagtaggcacgtaagaggctctggttgacctgtggctctcattctctttggtgaagaaaaaaaatggctgcaaggccacccccagtgcaattatgctcacagtcctctatgtctgaagaggggaagaggaactgaggccaactcgaactcaagatgaagtttggtactcttttatttgctcaaggccatgtggccaacgtggattttttagaggttggtattttttttgagatagagtttcatcttgttgcccaggctggagtgcaatggtgtgatcttggctcactgcaacctccgcctcctggttcaagcgattttcctgcctcagcctcctgagcagctgggattacaggcacctgccaccatgctcggctaatttttgtatttttagttgagatggcatttcgtcatgttgaccaggctggtcttgaactcctgacttcaggtgatcctcatgcctcagcttcccaaagtgctgggattacaggcgtgagccaccgcgactggcctagaggttggtattaagggcctgaataagcacactgcctttcctacagcaggtgtgaagcagatgttccaataaacatctgttgagcagaacaatctaacacacagattcatccagctttttaaaacttctttttcggccgggcgcagtggctcatgcctgtaatcccagcactttgggaggctgaagcgggcggatcacgaggtcaggaggtcgagaccatcctggctaacacggtgaaactctgcctctactaaaaatacaaaaagaaaattagccgggcgtggtggcatgcacctgtagtcccagctactggggaggctgagtcaggagaatagcgtgaacctgggaggcagagcttgcagtgagccaagatcatgccactgcgctccagcctgggtgacagagcgagactctgtctcaaaaaaaaagaacaaaaaacttctttttctagttatttggctatacctgggtctctctattatggtggataggtccaaaagcaaaggtaaaaatctgggcctggcacagtgactcacacctgtaatccgagcactttgggaggctgaggtgggaggatcgcttgaggccaggaatttgagactagcctgggaaacatagcaagaccttgtctccacaaaatagttttttaaggccgggcatggtggctcacacctataatcccagcacttctgaaggccaaggcaggcagatcgcttgagctcaggagtttgaaaccggcctgggcaacatggtaaaatgccgtctctaccaaaaatacaaaaaatcaggctggcgtgatggcacacgcctgtagtctcagctgttgggaggctggggtggcaggaagccttgagcctgggagacagaggttgcagtgagccaacatcgagccactgcactccagcctgggtgacagaggagaccctgtcttaaaaaatgaaaaaaacaagtttttcataaaattacctaggtgtggtggtgtgtgcctgtagtcctagctactggggatgctgaggtgggaggatcttaagcctaggagttcgaggctgcagtgtgctaacaaggtgccactgcactcctgcctgggcaacagagtgagatcccatctcttaaaagaaagacagaaaaggtaaaagtctatgtctactttacttgttgccttaaaaaatatgaatcccaggaagagggctcaatgtgaaacacaattacaaattaaattcttaaatcccatttaaccaaacactttctctgttattcctttctttcctttagaacaaaaatgtggcatgtgcttttttttttttttttcttcaatctgggaatgttattaagccctagacattattagacagactctgctgggaggagacctacttttcttcccttcagtgggtcttttcctactaaatttccatctctggagccagagggaaaaactatctgtccttaggtttgcacttttttctctttcccttgttaaatgttcaagtaaatataaaaatcataggaacctaaatttgaaaaaaggaaaaaaaaagagagaagaaagtgctgctaacactagagttggagagttatgtagccatttttaccctgagtctcttgattccagcccgtgtgatttgctggcagtcatagagttctatccgctcaaggctatgacagctcttcaagtgctccagggatgcatctgtgattagtgggcagttgtccagctcaatcacctccagctggtcatgggcgcaggccccattccccaggtgacgaattccatcatctgtgatcagctcacagtgagacagactctgcagccaaatagagcaaggaaggatgttgaaatatcttctggcattcctctagccagaggcttgtgtgaattggaaaggagacattttggtttgattttgatgaatatggagctggcactagatccacgtggtgaaatttaaaaaactagagatagtggggttatgcttttggcaatcagtgattgatattttggtgtgtgattctaaatatattttataaattcatgtaatgactatgaagtagttcataaacaaaataagacagccttaaaaattaccccttcctcaaattaacacttttccttctctacagggataaatgggaatcaagcttttcatgcagttttctggaatttgaactaaatattgaatatctggttcagagacatgccccaacaattaattagctgaagatttttacagctgtcaggtgtgatcatctcatcatctcttcatcaatatttattaaatccctgatcctgggaaactcagaaaatcttgacccaattttagatagtactgtgtcaccaaacaccaaaaatgagcctggatacaacagaacagtcactcagaatgccttcctctagtgtcactgaaagtaggagcagaacaccccttagtaaagctttgattggttccattcttacgaccagtaacattacatcttaaggtgaagcaaattgtattttgggcaatctgatcccctggatctctagaaatttaaacatcattcaggttggagtataagttatctacaaaagagaactcatatgttccaaggcagttttcagtcttcaagcattgatatagaaaacatttaactttttcagttcttatctgtttcctacttcactcatgtactcctttggttctcagtaagctggcagtttgaagaagcatcctttcctaaaatggtagccagacactaagagctgggttcttgaactgtagcactggcttttgattaaacccagtaaacacataaagttttcaaagttaaactcaccaatacttgaagtcgaggacagtgtatagaaagttggattaatgtgctatctgttatctgaaagaaataacgtatgttgattttaggtataatccaaataaaatcctgagtcatacctgattcttttttcttttagtcttgctctgttgcccaggctagagtgtagtggtgcaactataagctcactgcagcctaaaacttctgggctcaagcaatcttcccacctcagccccctgagtagctgggacaacaggcacaagccaccaggactaattttttaaattaaaaaaattttttttttttttttgtagagacagggtttccctatgttgcccaggctgctcttgaattcctgagctcaagcaatcctccacctcaacctcccaaagctctacaggccaccatgtgcgatcacagctcattgcagcctcaacctcccaggctcaagccatcttccagcctcagcctcctgaatggctgggacaacaggtgtgcaccaccatgcccaagaaatttaaaactttttcttgggcagaaacagggtcttgttatgttacccagactggtcttcaactttcaggctcaagcaatcctcctgcctcgcctcacagagtgttgagatgacaggtgtgaaccactgcatgtagcagccccatacctcattcattctttttttttttttttttttttttttgagacagagtctctgttgctcagggtggagtgcagtggcatgatctcagctcactgcaacctccacctcccaggttcaagtgattcttgtgcctcagcctcccgagtagctgggattacaggctagtttgttgtttttttttttttttggagatagtctcgctctgttgcccaggctggagtgtggtggcacgatctcagctcactgcaacctccacctcctgggttcaagcgattctcctgcctcagcctcccaagtagctgggattataggcatgtgctaccacgtccagctaatttttgaatttttagtagagatggggttacaccatgttggccaggcagatctcaaactcccgacctcaggtgatccacctacctcagcctcccaaagtgctagaattacaggcatgagccaccatgctcggaatatttttagtggagatgggggtttgccatgttggccaggctggtctcgaactcctggcctcaggtgatccacctgcctcaggcttctaaagtgctgggattacaggagtgacctactatgcccagcccccatgtcttattcttgactacatttctagtccagacattttaataatcaatcatcaaataacagaatctttcggtttaaatcccattggctacctgaacctgttctatgagaatccactcaggctacatttgaacacatctagtcatctctagtcttcatctttagacagctctattcaaaatctgttttattttttaaatgaatcaaaatctgtccccttggtagctagttgtagtggcttgcgcctatagtcccaacaatgcttgggaggctgaggcaggaggattgcttgaggttagaaattcaagaccagtctgagcagggccagacatggtagttcacgcttgtaatcccagcactttgggaagctgaggctggtggatcacctgaagtcaggagttcgagaccagcctggacaacatgttgaaaccctgtctctactaaaatacaaaaactagccgggcgtggtggcaggcgcctataatcccagctacttgggaggctgaggcaggagaattgcttgaacctgggaagtggaggttgcagtgagccgagactgagcactgcactccagcctgggcaacagagtgagactctgtcctccccaccccacaccacaaaacaaaacaaaaaaaaacagtctgagcggtaacagcaagaaaaaaaacagtctgagcgataacagcaagaccctgtctctaaaaaaatctgtcccccagaacctctacttgctggactttgttctatctccttagaatcatcagagaaaggaatcagacgatagtgcttgctggactttgttctgtctccttagaataatcagagaaaggaatcagaagatagtgcagtgctctatgaaaaaaattaatgttggaacatcctaaaatttttaataaagcatgccactactcagtatcgataacttgggttattttcccaagggtggcagccaggcactgctggaatctgggttaaccaagaatattcaggtaggaagaacagttttcatggttatgttaggactgaaagtaaatcagcacttcttttcaaattcttctccaactctgagtttattattttctactacacatagcttcacaggggctacaaaatggtagagaaagggggtgggcgagcaggcaggcatgtccgttcagaaggaataacactggaagggacatagaggacactcaggcatgtataagagataaacggatgcgaacaagttttagtttagtaagaactaacagctgttaagtagtgcctataaaacaaaaaattttttagaaagtggcttttacagttactgacatatctcgccttctttatttttaccattaaaaaattaattgctctttcttttgtggagtcccatgttcgaagtttttccttggtcaattaataatctcaaagttcttaaaattgtgttaatgtggctcacgtctgtaatcccagcactttgggagggcgagccaagtggatcacctgaggtcaggagttcaaaaccagcctggccaacacagtgaaatcccatctctactaagaatacaaaaaatcagccgggtgtggtggcgcatgcctgtaatcccagctacttcagaggccaaggcaggagaattgcttgaatctgggaggtggaggttgcagtgagctgagatctcgccactgcactccagcctgggcaacaacagtgaaattccatctcaaaaaaataataataataattaaaaaataaaaactgttaatcaggagatcagtttggcttaaaggcagagttccatgcagagtcaggtctccagggctaacgatgccagggatctaggatacagcaaagctaaagaaaggcagtgctatatagatcagtgtgatggggctttaattatttactagcatcataactctacaggtctaaggaaatatttttaacagctttacagcctgaatgcttgggcctcctttctctctaatggcaacctgattgatggcatatatttccacagttctgcaacacataccatgagcacctctgcctggaagataccttacttaatggggaatctgcaatgctgtcaggcactacagtatcctacactagggtagggaattgcacattctgatgttgtgtattatctaagtgtctactatactgtatttctgaattaaaatctacaatcttacctgaacacactcttccaggtccatcttttcaagttcatggcaattctacaaagtacaaaaacaaacacaaacattacagtacaaacatttaaaacatgagaaacttttaaggacagaaaactaagaggtaatattaaatacgttgataaattctttggtgtttcagagctagtgtcatgctaatttttttttctttcttttgagacaaggtctcactctgtcacccaggttggagtgcagtggtgaaatcatggctcactgcagcctccaactccctgggctcaggtgattctcccacctcagcctcccaattagctgggactataggaatgtgccaccacacctggctaatttttgtatttcttttcttttttttttctttttgagatggagtctggctcttgtcacctaggctggaatgcagtggcatgatctcggctcacggcaagctctacctcccgggttcacgccattctcctgcctcagcctcctgagtagctgggactacaggcgcccgccaccacgcctggctaattttttgcatttttagtagagacggggtttcaccatgttagccaggatggtctcgatctcctgacctcgtgatccgcccgcctcggcctcccaaaatgctgggattacaggcgtgagccatcgcgcccggcctttcctcttttttttttttttttttgagacagagtttcgctcgttgcccagactggagtgcaatggcacgatctcagctcactgcaacctccgcctcccggattcaagcgattctcctgcctcagcctcccaagtagctgggattacaggcatgcgccaccatcaccggctaattttgtgtttttagtaaagtcagggtttctccatgtgggtcaggctgatctcgaactcctgacctcaggtgatccaccccccttggcctccccaagtgctgggattacaggcatgagccaccgcgcccggccttttgtatttcttacagagatgaaatttcgccatgttgcccgggctgggctcaagcgatctgctttccttggccttccaaaatgctgggattacaggcatgagccactgcacccaggctatggcctcctttagtcatgccatgtgctggctcccacctaattaatattctatcgatctgcctaaaagcaaacgaccatccccttgtaccataacactggtcaaagtcagtataattttaaatattatcatatagtaatttataaacccgtccaagtattaaaatactcaggagaatacagaaaatctcctaaaacctttccatttagaaccagacatgtgtttccttcaatgttactttcatccactagtcatgtaccaaataaccaataagttttttcacaaagtaccaagaagcacctgcttaatctattagcttatgaaattgtgaagaatcaagtctcatgggtgggtgcagtggctcacgtctgtaatctcatcactttgggaggccaaggtgagcggatgacttgaggttgggagttgaagaccagcctggccaacatggtgaaaccctgtctctactaaaaatacaaaacttagctggatgtggtggcacatgcttgtaatcccagctactcgggaggctgaggcaggagaaatgcttgaacctgggaggtggaggttgcagtgagccgagatcgtgtcactgcactccagcctgggtgacagagcgagaccccatctcaaaaaaatttaaaaaaaattgtttaaaaagtatcatgaaggggttttatattctccaatgcatgtgtgcatttctaggagcagtttgtattcttattgatatcagtaggtctgtagctatagcatgaaaccccgtctcactcacccaattctgctaccatttcacatttcccttgctgcttgttcttctgaaataaaaagccctaataaaacctatggaaacaaacctatggaacctaaagaaaatacttaccctggctagagtggtaaagcccacatctgttaattgagaacatcttgccacttccaatattctgttaaaaaaaaaaaaaaaacagtgaaagtcaagctcttggtccctgaaaactgagtttattaaaacagtaagaatttacaaaaacaatcttctattctctaaggactttataatatagaatgacattaacaactaagcaagtctgtatacagatcttgccattcattttcatggagtcatcataaagtggtcctataaataccacatttcagggtgatgcaatcaatgaacacagaagaatataattgaagcttgtagttaatgccaaaacgcatgaaatgcattaaaagccttcttgatggcatactgcttacccccagagggcagcctgctcctagaaaacaaaggaaacggagatactctatttcagttaatctcttgctgaaatgaattattttctttcctgttttagaagtaggttcacttagatttaaattgctttaaaaaaaatgtgacaggccgggcatggtggctcatgcctataatcccaacactttgggaggccgaggtgggcggatcacctgaggtcaggagttcgagaccagcctggccaacacggtgaaaccccatttctaccaaaaatgcaaaaattagtctggcgtggtggcgggtgcctgtagtcccggctactcgggaggctgaggcaggagaatcgcttgaacccgggaggcggaggttgcagtgagccgagatcccgccactgcactccagcctgggtgacagagcaaggctccgactcaaaaaaaaaaaaaaaaaaaaaaaaaaaggtgggggggattgcttaattacaggtctatcccaaatatgaaattctagacttgtgaaagcttcctgctttctcccacaggctcccatggaggcccagttgagagggaagctgagctggcagccattcacctcttattaagcaactgttaaactccaatctaaataccaaccacaggattggggaatcaaaagtagctctcttctgtgaaaagttgggtgacctctgtaaaatggtaacaaagaacatgtttgtttataaaattcttactactgaagttgaaaaaaattgaagttaaagtataggaaacaattatcaactgaaaatcaatgagaaatggatggcggggtgcggtggctcacacctataatcccagcacttcaggaggctgaggcaggaggatcacttgagctcaggagttcaagaccagcctgggcaacataccaagacttcaccagtataaaaaaatttttaaattctgtccgggcgcggtgactcacgcctgtaatccctgcactttgggaggccgaggcaggcggatcacgaggtcaggagatcgagaccagcctggccaacatggtgaaaccccgtctctactaaaattacaaaaaattagtcaggcatggtggtgggcacgtgtagtcccagctatctgagaggttgaggcaggacaatcacttgaacccaggaggcggagtttgcagtgagctgaggtcacgccactgcgctccagcctggcaacagagcgagactttgtctcaaaaaaaaaaaaaaaaaattttttttttaattccaagagatggccaggtgcgttgactcatgcctgtaatcccagaactttgggagggcagatcacctgaggccaggagtttgagaccaccctggccaacacagtaaaacccaatctctaccaaaaataccaaaaaaattggccaggcatggtagcgtatgcctgtaatcctgcctactctggaggctgaggcacgaaaattgcttgaacctgggaggaggaggttacagtgagccaagatcatgccattgcactccagcctgggcaacagagccaaactctatctcaaaaaaaaaaaaaaaaaaaagaaagaaagaaagaaagaaagaaaaagaaagaaagaaatgaatgctacctaatgggaaaacacgatctgactggaacacaacttttgattttcacagttgagagcttttccattctaacaatgtaatgaaccatatagggagatggagctgaagactcctctctctacagtcgaaaaggataaagtgtaagatattcagagagaagtttgattacctccccagctcttgaggaatattttaggcttctgatattactaattttgaccaataggtgtatgttctcttaagaaattttgatattgtaggcaaaaggtttttttgtttgtttgtttttttgagagggagtctcactctgccacccaggctgggagtgcaacttccacctcctgggttcagacagttctcttgtctcagcctctcgagtagctgggattacaggagtgggccaccacgcctgtaatttttgtatttttagcagagacgaggtttcaccatgttgaccaggctggtctcaaactcctgacctcagatgatccgcccgcctcagcctcccaaagtgttgggattacaggtgtgagccactgcgcctggccacaaaagttctttcaacaattatggttaggccaggtaatcatcagaaacaattttctgaaagttttatagctttacaatgattattatatgtaagaaaagtggcttcataggctcaggaatcagagttcctgggtgaatacttgttcctacactaactagctgagaccttgagcaggttactttgtctctttgtgcttcagttttctcatctataaaatggcagtaacaaggctgggtgtggtggctcacgcctgtaaacccagcactttgggaggccgaggtgggcagatcatgaggtcaggagaccatcctggccaatatgatgaaaccccatctctactaaaaatacaaaaattagctgggtgtggtgacactcgcctgtagtcccagctactagggaggctgaggcaggttaatcgcttgaacccaggagacggaggttgcagtgagccgagatcgcgccactgcactccagcctgggcgacagagcaagactctgtttcagaaaaaaaaaaaaaaggcgataatagtgcttatatggtgctatggagattaaacaaattattactgttattgagaaagagtctcactctgttgcccaggctagagtgcagtggtgtgatcttagctcactgctgtcttgacctcctgggctcaagtgatcctctcactttagcctcctgagtagctgggactacaaggcacacatcgccatgcctggctaatttttttattttttgtagtgacagggtttcgccatgttgcccatgctggtctcaaactcctgggctcaagcgatcttctagcctcggtctccctaaatgctgggatcacaggtgtgcgcctcggcactcagccctgaattagtatttgtaaagcacctaaagcaacacctaatttacaagtactatgtaagtttattttagagaacaaaaagtgtagccaggtgtggtagcacatgtctttagtcccagctactcctgaggctgaggtgagatgatcacttgagcccaggagattgaggcaggcatacacaacactacctcaaaagacagtaacaggctgggcacagtggctttcacctgtaatctcaacactttgggaagctgaggtttgaggccagcctgagcaacacagcctgaccccatctctacaaaaagtaaaaaacacagcattcttcaaactgaggagccagagagaaataagactgttttaaaaacccatcagtacaaaagaggtattcctttaagagtgtcttttaaatatagtaccccctgctatgtacctggtatcattactatgacaaatgaccttagggtggacctttaaaaactactttgagaaaagaattatacaaaagcattaataagagaaaatacctttctttctatctcaagtaataaaatgttgattcttttttctagtatggatagcaagtagtggaatttggggattgttaccccttggttcacaccaattacatgaaatcaaatgaggtacaaaaaggaagtaggtgggcatctaaaagggactaccttaaaatttcaaagcgtctgcagtgcctaccttaaaattccaaagttccaaggaagaaatatgggtgaaggaaacttttgttctatgatttttttgagctaaacaagaaatgtttacctaagccgtgggcagttctgacctagagcattcaggatggcatctgtgatgttggagcagccagaggcacaaagggattgtaacttatggcaccctctgcatatagtaatgagaccttcatctgtgatttgctaaaaaacaagagcaaaaaaatccatagatattagtatcttagcaaaacaaaaaaagaaaaaaatgatagctctgtgaaaataatcaccaaaaaggaaatcaagacatgcttaacacattcatcagatagcagacctaaaagaaaatgaacacacgttgtttcttccttccagttctctgtgcttacctttggtgcaaagggaagaagctataatagaatcctgttgaaagctacaatggaattctaatagaactgggatcagtatggggtacatcatagtttaggttcaattaaataattttatttatttatttatttatttatttggagatagagtctcactctatcacccaggctggagtgcagtggtgcaatcttggctcactgcaacctccacctcccaggttcaagcgattctcgtgcctcagcctcctgactagctgggactacaagtgcacgccaccatgtccggcaatttttttttttgtatttttagtagagatggggtttttggccaggctggtctcgaattcctggcctcaagtgatctgcccacctcagcctcccaaagtacttgaatcacaggcttgagccaccatgcctggcctcaattaaatattaaaacctagaaaaaagataaggatataagtattttagtagtataaatatatctaaaagttcaaattgacactgataagttagtgaaaaaaattaaactgtggatgacagttgcaatattgtatcagccacagcatccatttacttctatattttagttttataatataaagaacatcctaatttatagataaaagagttgtatctaactcagacacaattttgtattttttacaagttattagactgggtggagtggctcacacatgtaatccaagcactttgggaggctgaggtgggtggatcacctgaggtcgggagttcgagaccagcctggccaacatggtgaaaacctgtctctactaaaaatacaaaaattagccaagtattgtggcacatgcctgtaatcccagctacttggacggctgacacaggagaatcgcttaaccccaggaggagatttgcaccactgcactccaccaggcaatagagcaagaaaagaaaaaaaaaaaaaaaaaaaaaagggacgggaagggaagggaggaagagagggaaaggaaagaaggaataaagaaaggaaagaaaggaagaaagaaagaaaagaaagggaaggaagggaaggaagagaagaaagaaaggaagaaggagggagggagggaagttattgaggccgggcatggtggctcaagcctgtaaccccagcactttgggaggcggaggcgggtggatcacgaggtcaggagttggagaccagcctggccaagatggtgaaaccccgtctctactaaaaatacaaaaattagccaggcgcagtggcggatgcctgtaatcccagctactcgggaggctgaggcaggagaatcacttgaacctgggaggtggaggttgcagtgagccaagattgtgccactgcactccagcctgggcgacagcctcagcctcccaaagtgctgggattacaggcgtgggccaccacgcccggcccaggtacaaatatttcataaataatatctggttgttttctaaccaactgagtaatttgttgcacaataagccacctcacatcaaagatgttatatttttagaaatattacaagcacacatgcctacagtcccagctactcaggaggctgaagtggaatgatcgctttagcccaggagttcaaggttagtctgggcaacataatgagaccacccccaactcccgtaaacaaaaaaaaggaaagttacacataaacatctcaacatggtggatactatcaactcttcaatttgtcctccagattcactaattttgtgtaggcctaaaaataaaagctctcttcttgtctctgtttaatagtcatgtccataaattacaaggacaactgaaaaaacaaaatcccacaacttttaatatccactgcttaaatcatgctttcaatatcatgtagctgacacaaatatagattaaaaaaattggatgctaaggcagatactaatgaggatcaagtaatgagatactaacacacgtggaggcagctaaaaaagtcccacacaaacatgatgtattgtctttagactatgatagccgagatgtaaagagggaagtaagaatcaatacacatgcaaatttagcaggccaaagatatttgtgccacacaatattagaaaagtaccgtagggctgtgctgccctttcctttgtatgttataagagagtactgaggaagaaagatgagttaagtcatactgtcagtactttaaaaaattgtaggccaggcacggtggctcgcgtctgtaatctcagcactttagaaggctgaggtgggcagatcacttgaggtcaggagtctgagaccagcctaacatggcgaaaccccgtttctactaaagatacataaaattagccagacatggtgtcacgtgcctgtaatcccagctactggggaggttgaggaaggagaatcgcttgaacccaggaggcagaggttgcagtgagccaagatcatgtcattgcactccagcttgggcaacaagagcaaaactccgtctcaaaaaaaaaaaaaaaaaaaaagtaaaatttactaaacttttatgtttttcaaatctgtcaagaaaatgaaagcatcaaaaatgtactttaatcacctcaataattttgggcagagcatgaaatctcatgaatgctgagaatcattttatcacgctgtagggaagaaatgactcctgtactaagatttgggtgaaggaaaacaataaaatacacataagatagaattggttctttacgttcactgtgattcctgcctgctggaaggatgaagaaacaccaaactaaacccacaaatgtacatatttatgtctatatgtgtgtgtatgtaatgtgtatgtatagagtgtgtaaatatatgtgcatatatatgtgcttatacatacaaacacacacacttgttttttgttttgagacagagtctcgctctgctgcccaggctggagtgcagtggcgtgctcttggctcaccgctacatctgcctcccaggttcaagtgagtctcctgcctcagactcctgagtagctgggattacaggcacacaccaccacacttagatggtttttgtatttttagtagagatggggtttcaccatattggccaggttggtctcgaactgctgacctcaggtgattcacccgccttggcctcccaaagtgctgggattataggcacgcgcgtgtgtgcacacatacacacgaagctctccaggaatagtttttctttggcattttaagataatgatttcatgtttacaataactgtggttgatctctcaggagtaaacattccagtctttttttttttttttttgagatggagtctggctgtgtcgcccaggctggagtacaatggtgcgatctcagcttactgcaacctccacctcctgggttcaagcgattctcctgcctcagcctcccaaatacctgggattacgggcacacaccactacgcccgggctaatttttgtatttttagtggagatgggtttcaccatgttgcaggctggtctcgatctcctgacctcaaacgatccaccgtctcggcctcccaaagtgttgggattacaggtgtgagccactgtgcctggtcacatttcagtcttaaaaatgaaatcatggccgggtgcagtggctcatgcctgtaatcctagcactttgggaggccaaggccggcagatcacttgaggtcaggagttctagagcagcctggccaacatggcaaaaccccatctctaccaaaattagccaggcatggtggcacgccctgtaatctcagctactcgggaaggtggggcaggagaattccttgaacctgggagatggaggttgcagagagccgagatcgcaccactgcactccagcctgggcgatacagcgagactccgtctctaaataaataaataaataaaatgaaattaggcaaattctgatagtcagcaactatagtaatcggaattgtaaggaagagcccaggtagctcacgcctgtaatcccagcactttgcgaggctgaggcaggcagattgcttgagcccagacatttgagaccagcctggcaacatagggagaccctatctctacaaaaaaattaaaaaattagccaggtgtggtggcacacacctgtagtccaagctactcagaaggctgaggtggaaggattgcttgagccctgtagttggaggttgctgtgagctgtgatcatgccactaatagtccagtctgagtgacagagtgagacttcacctcaaaaaaaaaaaaaaaggaacttatcacttttttctttgccatgagcaactctcactccaaggcaaatacatttgtaatttttaaggcaagagaaaaaagctaaaggtgtactgttggccaggcacgtggctcacacctgtattcccagcactttgggaggccaagccaggtggattgcttgagcccaggaattcgagaccaacctggccaacatggcaaaaccccatctctacaaaaaaaatacaaaaattagctgagtgtggtggcacatgtctgtagtcccaactactagggaggctgaggtggaacaatcacttgagcccgggaggtgaaggtgagcaaaaatcacaccaccgcattccagcctgggtaacacagcaagactctgtcccaaaaattaggccatggcagtggcttacgcctgtaatcccagcactttgggaggccgaggcaggcagatcacctgaggtcaggagtttgagaccagcctggtcaacatggcaaaaacccatctctactaaaaatacaaaaattaccagcctggccaacatagtgaaaccccatccctactaaaaatacaaaaaaatcagccaggtgtggtgacgggcgcttgtaatcccagctacttgggaggctgaggcaagaagaatcgcttgaacctgggaggcggaggttgcagtgagccgagatcgtgcctctgcactccagcccaggcaacagtgcaagactccgtctcaaaaaaaaaaaaaaaaaattagccgggcatggtgacacacacttgcaatcctagatactcaggaggcagaggtaggagaattgtttgaacccgggaagcagggttgcagtgagccgagatagcgtcactgcactctagcctgggcgacacagtgagactctgtctcaaaaaaaaaaaaaaaaaaaaagtagctgggtgtggcgtgtaatcccagcaatgcagaaggctgaggcaggagaatcgcttgagcctaggaggtggaggttggctgcagtgagtgcagatctcaccactacccttgagcctgggtgacagagtaagactttgcctcaaaataaataaataaataaataaataacaaaataaagatgtactgttaacattctaggtgcctgaatagtttcagcaaattatctgagtagaattcaggggttttggggtagacacaaaaaagctgatagtttgaacaagacaaaacgctaaatatagatgctacttgaaaataatttgacgagtatatattgctcatcatcttatttatttttttgagacaaggtctcactctgttgcccgagctggagtgctgtggcatgatttcagctcactgcacctcaagctcccaagctcaactgatcttcccacctcagcctcccaagaagctgggactacaggcacacaccaccaaacccagctaatttttgcaccttttgtagagacggggttttgtcatgttgcctaggctggtctcaaactcctggactcaagcagtctgcctgcttcagcctcccaaagtgctgggattacaggcatgagccaccgtgcccagcttgactgcaattttaaatactaaacttgtgaatcatttacattttaaaagtagacagtttttttaagtatgtaagaaaggggtggagctacagttagttcatctggaattctgcataagctagctacctcctatcttatctatgccaaggcccctaggaatgagtattgttaagcacgtcaaaagtcatctgtgtgtttactttgtcactagggttgtggtagaaaaacaatactggtcttgatgactgaagctcttaaaatagctcttaaaaattttaatgaaatgaattactaaaacagaagagttgtgagaagggatgtttaccaagcaagtctgcaagttcaaagtcaccagttcagggcagtgtgcacctatgtacttgagagcttcatcttctagctagaaagattaaaaagtaagaaaaaaatgattattgacattgtctcaaaggaaagagatttaagaatgtacacattcattcatacattctaatacagccaaccaagtttcgaaggaacaatgaatcagaaaatacgctatgatcatataacagtataattcttattatgattctcagtatttttaaaatcagctttgaccacattcaaattcacataatcatcaaatcaagaacaaagatgaagtaaacactgcctagtttttatgggttttacttctgataaattaaatatacctgacagcattttactgagggcccatgaaactaaaataattttcaaacttctacacaccccttataaagttttttataaacaaactttgaggaaatacagccaagaaaggaatccagtgttcatctcccactggaagataggtgccatgcttacagtgctgagaacagatggtaagtaactgattataatgatacattccaatcagtatttttcaggattccttaaataaccagaagctcaagctgttgttttaaggcagtcatacatctgaaattctctttcaaacaatggaacccctctcatcgtgataaaagaatcagggcacttttaatggaatccaagttatggttttagtaaccattaataaaataaagtagagcctagccttagtttgtcagccacaatttaaatccactcatttctttccagaggctaactaatcaattctttttttcactataaaacactgagatagtaaaatttttaatgacaaaatatgttggatttgtaatgtgactggcaggaaataagcatcaatactataaaatgcaggttgctgtacacttggcatatttaagaaacactggtggttaaaaaacaagtggaaattgctaagactgccttctttgcctatccagttcaaagtatcaggcagtgacaacaagccaagttttcttttcagcacaaattaaactgcatggaactcttcttgaccatggtgtatctttaatataatcttaatttacactttgtctccctcctcctcaagtttatttttggtcagatgttaattcttctcattcttttatcctaaggaaaacactttaatttttggtaagcatttgtcttttgtcaataatacacacaactaacctttccctccagacaaacatcttggggctgtctataaagagctcatgattcattcacgattcttccgaatttcacgagccctacatggagtattacctgcgtgcagccttttaagaataaggccttgagacccccacagcccctcactagtgcttgaatgccatccttggttacttggtcacaccaggaaatgttcaactgctccaacagtggacatccctcacttaggataaaacaaaataagagaaacatatcactaaatccaattccaaaaacaccaacgtctcaatttattggctatttagtaaaggaatggaaacattcccattttttcccacaagaaaaaacatatttacctaatgtatatttagatttatcgatgtggtattcacatgggactataccattagcaggaacatctaaaatccagcttaaccaacaaacacaaagcattataatgtttttcagatttatattccttttgtacttatcacatatctcaaagctctctagacaaaaaatggaaattaagtgatttattctagtttacagagtaattaataaagagctctgattcaaaacgagattctccatcgagcaatgctattactggttgagtatcccttatcttaaatgcttggtaccagcagtgtttcagatttcagattttgcaatatttgcattatacttacatagctgagtatcccatatctgaaaatctgaagtgccccagtgagcagttcctttgagtgtcacattgatactcaaaaagtttgggattttgaagcatttcagattttcttttctttctttttttttttgagacagggtctcgttctgtcacccaggctggagtgcagtggcgccatcagggctcactacagctgtgacctccatggctcaactgatcctcccgcctcagtccctcaagtagcacccagctgcattttggatttttgaaacggggatattcaactcacagtaccaaagtagtaatgaagccttttaaacttttattttaaaaaattacaaaggccctgtgtatttccttatctgagatgtttctagagtaccgcttttgtaggctgaatttaggatatcttatgtccgatctctgccttcaaaatactagtttcattgttgattccatctactcttaatagtttagcttcatatttgtattatggatgaattccaagttttctataatattcttcagaaaaacactccataaattgtttgaaatattcctgcctgcagaaaagatccagaagataaagccatgatatcaagttcattctccaatattaatagtttaacttcaggcaaatgactttaggaagcctgtctgaacctctcttagtccaagattagccccatagctctctgttttcccaaaactgatgtactcattcctaccatagcatttattccacaataacagttgactgtgagcaacttaagggcagcaatatcttactcggttacatctcatggttgcatcacagtacctggcagtcaacagctttctagattttcttagctgtaaaatgaccatccactctacttcacaaagcttttaaataaataagatcatttatgtgaaaatattttataaatgataaaagttgttatattatcaagtttattagcctacacagcaaaccgtcttaggtacatgtgttcaatattcacaaagaaggtctaaaaggagccacattttagattatttatactctacttaactaaatttgtatttttttcttgagatgaggtctcgttctgttgcccagcctggagtgcagtggcacgattacagctcactgcagcctcaacctgctgggctcaagtgatcctcctgcttcagtcccctgagcagctgggactacaggggtatgccaccacgcctggcaaattttcttattttttttagtagagacagggtttccctatgttgcgcaggctggtctagaactcctgagctcaagcgatcctcttaccatggcctcccaaagtgctgggattacaggtgtgagccatcacgcctggcctcagggaccctttttaaagcactttatattcattaggttgagccacatgtagctgtcattcttataacatgaaaactgtcaaatactagcaaaactttatatggtgttgcctaataccttgttaaaccttaataaaatgttatgaggtgataagaaaaagctcagaaaggttgtgtttgcttaaagtacctggttaataatctggctccagatacctgttttaagcactaagctataacacgtgccctttctttctttttttttgttttttttgagacagagtctcactctgtcagcacactggagtgcaatggtgtgctcttggcttaccgcaacctctgcctcccgagtagctgggactacaggcgcacgccaccatgcccaactaatttttatatttttagtagagacagggtttcaccatgttggccaggatggtcttaacctcttgacctcgtgatctgcctgcctcggccgcccaaaatgctgggattacaggcgtgagtcttcatgcctggccttattttctttttgaaaataagacttcataaaaatctaattgtttatgtataaactgtactaccctgttcagaaatcctagttacctctagtcatttcactttagtatgtcccataattgtaatttgggcaagtggtaaaacaaattatctattctgaactatagaatatatccataaaacagagttgccttcaattcccactttatatcaattatttttttaaaatatgtatttttttttgattacttgacatgcttattataagaaatttacctcagagcttttagagacatgtttgttattgatgtacaggaagccaagtcaaggtgcctgagtttggaacagaacttgctaaggctagtacatgtactgaaaaatggaaaaaggagaaaataatgaataaacaagacaagtacacatccttggtatatcagacactgttcttattaaacacatgtgtatatataagaactgtaaaattttcatacccctaaaaaagcagttatatatcctacgacccttcacattgaggaagagacagataccattcacaaagaaaaaaggctgtgctgcatatgagaatttgaatgaggggaagatggtgtttgattcacattttaaaatgttaacagcaattgacaacatgatacttaatgtgagttcgaagagatctatatgcattttgcaaatccagaaacaccagaagctaatggctatctaccagacgtagtcaaacatgaagaagaaacgctctgcatgttttttcacttaaatccctactcaagataaccttttgcataacactaatgtaggaactggatttttgcaaggtatacaaaggatggactggtctggtattgggctgaaaaaagtaagttatgtattaaagacttttttctgctggtcaagttctcattttaatatttaacagatcatggaaaacttcaaatataaacaagagtaaataatacagagaacccacatgtaccatcagtaaacttcaacatttatcaatactgtttttctttttgagacaatcttgctctgttgcccaggctggagagcagtgttgcaatctaggcccactgcaacctccatttccgggttcaagcaattctcatgcctcagcctcctaagtagctgggaccacagacacacaccaccacacctagctaatttttcatattgtttgtagagatggggttttgccatgttagccaggctggtctccaactccgggcctcaagtgttccgcgtgcctcagcctcccaaactgctgggattacaagtgtgagccactgtgcctggcccaacatttatcaatattctactattaaatatttttatttcttgggaggctgaggtgggtggatcacctgaggtcaggagttctagaccagcctgaccaacattgtgaaaccctgtctctactaaaaatacaaaattagctgagcgtggtggcacatgcctgtaatcccagctacttggaaggctgaggcagaagaatggcttgagcccaggaggcggaggttgcagcgagccaagattgcaccattgcactccagcctgggcaacaagagtgaaactctgtctcaaaaaaaaaattttttttatgccatctcttcttccccccttttttattccaggattttaaagccaattccacacatatcattttacctgtaaatatttcagtatctatttcttttttttttttttttttttgagacagagtcttgttcttgtcgctcaggctggtgtgcagtggcacgatcttggctcaatgcaacctccgcctcctgggttcaagcaattctcttgcctcagccacccaagtagctgggattacaggcgcctgccaccatgcccagctaatttttctatttttagtagagacgggttttcaccatgttggccaggctggtcttgaactcctgaccttgtgatctgcccgcctcggcctcccaaagtgctgaaattacaggcatgagccaccacgcccggccttggtatctatttctaataggtaaatactttaatttattaatatcatctgatactgaaatgtgctaacttttctccaattatatcataaatgtttttgacaagttgatttgttcaaattaggatccaaacaagagtcacacattctctttggctgatatgtctcctaggtctttgtgtgggccaatgttttcatttcctttttctttttttgttacagacagggtctcactctgtcaccctggctggaatgcagtggcactatcataactcaatgtaacctccaactcctgggctcaagcgatctcccacttcagcctcctgagtagcaaggactacagatacatgccatcacacctaattaaaaaaatttttttgtagagacagggtctaactatgatgcccaagctagtctcgaacttttggcctcaagtgatcctcttgccttggccttccagagtgctgggattacaagcatgatccaccacacccggcttgttttcatttcttttgggtagagtcctaggaatgaaattgctagatcctatggcaaggttatgtttgactttgaagagaactgccaaactgtttcccaaattggccgtaccattttacattcccgccagaaattcatgagggacccagtttttccaaatccttgtcaacacttggcattgtctctctttttgaatacagctatcttagtgtgtatggtgtggaattgcattgtggttttactttacaattctgtaatgaaaactttttttttttttttttttgagatggactctgtcacccgggctggagtgcagtggcatgatctcagctcactgcaacctctgcctcccaggttcaagtgattcttctgcctcagcctccagagtagctgggactacaggcgcacaccaacacacccagctaattttttttgtagttttagtagagacggggtttcaccaagttagtcaggctggtctcaaactcctgacctcaaacgatccgcccaccttggcctcccaaagtgctgggattgcacacatggtgagccaccgcacctggtgtaaataccttttcttatgcttatttgccattcctatgtcttcggtgaaatgtctatccaagacttcagcccatttttgttcgtttaattgtcttctcattattaattctaagagctttctatatactcttgagagaagcactgttattagatatatgacctgcaaatactttctcccagtctgtgtcctgtcttttcattttctttcttttctatcttttaaattagagttggagtcttgccagaaacaccagtcaggctagatttgctcttctgggcttaagtgatcctcctgcctcagcctcccaagtagttgagactacaggtataggtcatggtccctggccttttccgattattatttttttaattttttccccctcagacaatcaggtgaagtgaccttttttgtttttttaagttaatggtatctttagacgcataattttttttttcctaagacacagtcttgctttgtcacccaggctggagtgcagtggcgcgatctcggatcactgcaacctctgcctcccaggttcaagcgattctcctgcctcagcctccagagtagctgggaggcacgtgccgccacactcggctaattttttgtatttttagtagagacagggtttcactgtgttagtcaggatgttttcaaactcttgaccttgtgatctgcccacctcggcctcccaaagtgctgggattacaggcgtgagccaccgtgcctggcagaagcataaaggtttttaattttaatgaggtacaatttatcatttttttctttatagcttgtctatgtgtgggctcctttctaggcactttattttaatccactgactgatatgtttatgcttatagcaccagcacattgccctgatgaacgttcctgtaataataacccttcaaatcaggtagtataagtccccaaacttcactgtccatcaaaattgatttcgttattctagaacctctgcatttgcacatgaatttagaatcagcctttcaatttcaacaaaaaaacctattgggattttttattggaactgcactgaatctgtagaacaatttaaggaaaacaagtatcttaacaatattgagtttttaggccagtctcagtggctcaggcctgtaatcccaacactgtgggaggctgaggcaggcaggctgctggagcccagagtttgagaccaccttgggcaacatggtgaaattatctctctacccaaaatagaaaaattagccaggcatggtgacacacacctgtagtcccagctacttgggaggctgaggtgggagcccaggagatggagggtgcagtgagctgtggttgtgccaccactgcattccagcctggacgacagagaaagaccctatctcaagaaacaaacaaaaaaaaaacccaaactataacaatactgagtttctaaatctatatgtatgaggccaggagtggtgactcacgcctgtaatcccagcactttgggaggccgaggcaggcagatcagttgaggccagtagttcaagaccagcctggccaaaatggtgaaaccctgcctctactaaaaatacaaacaaaaattagccaggtttggtggcaagtgcctgtaatcccagctactcaggaagctgaggcacgagaattacttgaacctgggaggcagaggttgcagttagctgagactgtgccactgcactccagcctgggcaatagtgcgagactcagtctcaaaaaaaaaaaaaaaaaaaaaaaaaaaaaattctatgtttatttctctatcatttacttaagtctttttaaaattttcttttctctaatttttgttagtgatcattttataattttcagtgtatatgatgacttacacattatttttaagtttatccttatattttttatatttttgggtattactataaatgatgtatcttaaacttcattttccaattgctgattgctagtatacagaaatagaattgagtttttgcaaagtagtcatgtatctcattactttgctagaactcagtggatctagtagctttgacagattccatggactttcctatgaatccaattataccattatgtgaatgccttttataatccttcctctattgcattaggcacaacatccagtacatgttgaacagctgtggtaagacctgatatccttgccttgttcctgatgttagggaatctttgatctcaggaagtctttcaccatcaaatatgatgttgtaagagatttttcacatatatacttgatcaggttgaagaagttacgttatcttatttgtccacaaacttttttttgagacagggcttcagtctttcacccaggctgaagtgcagtggcatgatcacagttcactataccctcgacctcctggacccaagcgatcctcccacctcagcctccgagtagataggaacacaggtgtgcgccaccatgcccaactaaccttttattttttgtagagatggggtcccactacgttgcccaagctggtctcaaactcctgggtgcaagcaaccctcctgctttagcttcccaaagtgttgggattacaggcatgagccaatgcactcagcctgtgcgtgttctttcttgactaatctagacagaggttaatcaagcttattcattttattttgaacaatcaacttttactttataagtcttctccattctgtatttttttttttttttaagacagagtgtcgctctgtcgcccaggctggagtgcagtggcgcgatctcggctcactgcaagctccgcctcccgggttcatgccattctcctgcctcagcctccagagcagctgggactacaggagcctgccaccacgcccggctaactttttgtatttttagtagagacggggtttcaccatgttagccaggatggtctccatctcctgacctcgtgatcacccgcctcagcctcccaaagtgctgggattacaggcactagccaccgcgcccggccacctattttttatttcatggatttccagtattatttccttccttcctttggatttaatttacttttttctatttttttcttcctttttggtaggtagggagggagggaggagagaggagagactcttttctagctctctaagcagattagattcttgattttaaaacttttcttttttttttttttttttttgagatggagtctcattctgtcacccagggtggagtacagtggcacaatctcagctcactgcaacctctgcctcctgggttcaagcgattctcctgcctcagtctcccaagtatctgggaccacagacatgcatcaccacgccaggctaatttttcgaatttttagtagagacggggttttgtcatgttggccaggctgttcttgaactcctgatctcaagtgatccacctgcgtcggcctcccaaagtactgggattacaggtgtgaggcactgtgcccggccaaacttttcttctctaatattagcatttgatgctatacattttgctctaagcaataccttaggcgcattccacaaatttacaaagttatattctcattatcactcaatgaagcatattttctaaatttcttcgtaagcaattctttgaactatgggttattccaaagtatgttatttaattttctaatcttccaggtatctgttattaatttctactttaattttgttgaggtcacagaacatacccaatatgattttaatccttccaaatgtattaaaatttgttttatggctcattatttggtttgtcctattgaatattccaaatgtacttgaagagaatgtttattctgatgctttttggtgtagcaatctataaatgtcaattatatcaagttcattgatagtgttgctgaagtccttaatagctttactgctttttggcatacttgttttataagccaggggtactatttaatacctttttttcatctaatttttttccttaaatttacgccatctgatattactgtccactccaactttcccaactagtatttataatagtatgtattttcccattcttttagtttcatttttttaaatttttgcacatatttgtaattgttatttaaaatttcttatgtacttatttacttactttttgaaatgtggtcttgataggttgcccaggcttgagtgcagtggctattaacaggcatgatcacagtgcactgcagtctctaactcctggtctcaagtgatcctcctgcctcagcctaccaagtagctgggattacaggagcataccaccacacctggcttgtaactgctatttttaaactccttattgttcagttctatttcagtcacttctgggtctatttcttttcttttcttttttttgagagtttttcgcttgttgcccaggctggagtacaatgacacgatctcggctcactgcaacctctgcctcttccgggtctatatttctattgactggcttttcttttggttttgggtcacattttcccactgctttgcatatgtcttataatttttttttttttttttgagactgagtcttgctctgtagcccaggctggagtgcaatggcgtgatctcagctcactgtgcaacctccgcctcccaggttcaagcaattctcctgcctcagcctcctaagtagctgcgattacaggcacccgccatcatgcccggctaatttttgtatttttagtagagacggggtttcaccatgctggccaggctggtctcaaactcctgacctcaggtgatccgcccaccttggcctcccaaagtgctgggattacaggcatgagccactgtgcctggccaacatgtcttacaatttttgattgagtgacagatattctgtatgccacattgctgggtttctggactttgatgtcttcctttaaagagtgctgagctgtgttttggcaggcagttaagtttgttttggatcacttttttttttttttgagacggagtctcgctctgtcgcccaggctggagtgcagtggcatgatctcggctcactgcaacctccgcatcctgggtttgagcaattcttctgcctcagccttccaagtagctgagattacagacacatgctaccacggcctggctaatttttgtatttttagtagagatggggtttcaccatgttggccaggctggtcttgaactcctgacttcaggtgatctgcccacctcagcctcccaaagtgctgaaattgcaggcgtgagccaccatgcccggcctgattcttaaaataaaataaataaaaaaataaaatatttaatagagcaggtctattttagccctaccaccaaggtgtaatctttctggagtctttattgaatgtcccaggtgttcaatgaattttctccattttgggtgggtggaacttcatccagccttattaagccctggaaattctttggcttatagtttcccagtaattgtttttttcctcactagatcttctttgccaaactgtgtggggtctcatcctgtgcatgcagagtttactattcagccaaatctacataaatttctgtagcctttattttttttttttagtagcttcctctttatcagccacaaatttcagctactttagcctccttgaattctgatctctttcttttcaaatcagcaaaaactctgtcctctgcttgggctccccctccctctatggcattgtctgaaaaatgcctcagtcacaaagtgaggataatcacatggctcattcatttgcttctcagtcttgtgccacaagtacaacatcctaaactggtcttctaggttttgtttagttttctagttgtttacagcaggagggcagttattgtcactgtgagaaggagaagtctacttggattttttttttttaagacatagggtctcactatgttggccaggctagactcaaactcctggtctcaagtagtcctcctgcctcagtctcccaatgtgctgggattacaggtgtgaaccaccacacctggctgcttctttattatttttttgagacagggtcttgctttgttgcccaggctggagtgcagtgaaacatagctcactacaacctctggctcccaagctcccaagcccaagcaatcctcccacctcagcctcccaagtagcttggactacaggcatatgccaccatgcctggctaattttttgtatttttttgtagaggtggggtttctcatgttgccgaggttgggctaaagtaatccacccacctcagcctctcaaagtgctgggattacaggagtgagccacagtcccctgctgcttctttgatttaaaaaatttgtatatttcaaggctaatactgtgtttaaaatagtgtatttttaaattcactaaaatgtggaaatttgaatattgacaactggttatttgatgattttaagatattgtttttagaggagtgataaaagttaatgcacttatggccagacacggtggctcacgcctgtaatcccagcactttgggaggccgaggtgggcagatcacctgaggtcaggagatcctgaccagcctggccaacatggtgaaaccctgtctctactaaaaatacaaaaattagttggacatggtggcatgggcctgtaatcccaggtactcaggaagctgggctgagattgtgccactgcactccaacctgggcaacagggcaagacatcgtctcaaaacaaaaaaagttaatgcactcatatgagagactttattgttaaagagtacatactgaaatacggattaaataatatgatgtctaggactttttttcaaaataagataaaacaagaggggataagtgggtggggttatcgatgaaacaagactggctgtaaactggtaacagttaaagctgggtgatgggctcattacacgtttttgtctacttctgtatatgtttcaaattttcatatttaaaaaaagtcagcagaagtaatttctctctgtgtgactataactccaacttgggttcaaggggttttttctttgaaccagagtcttgctctttcatctaggctggaatacagtagtgtgatctcagctcactgcaacctccacctcctgggttcaagcgattctcatgcctcagcctcccaagtagctgggatgtgccaccatgcctggctaatttttgcttttagtagagatggggtttcaccatgttggccaggctggcttgaacccctgacctcaagttatccacccacctcagcctcccaaggtgctaggattatagacctgagtcaccgcactgggctggttcatgtgtttttaatttgtagggattgctttcatttctttttgacttaatttttgtttgaattatgtaaaatatttacatggctattaaacgataaaacataattcagagttctcccttttatctctttcccttgtgttttctcacttccccatataagtaactatttttacttattttatttttgattggcatttccattctttttgaaaatatgcaaatatggagatatatatatatatatatatattaagtcttctggccctataaaaggtgtattatacaaactcctccgcagtttgcttttcttcatttaacaacatgtcctgaagatcatccagagtattatatatagattttcctcattacttttattcaacctgttctctactaatagacattggggagtttcctatcttttgctattacaagtaatgtagtagccttgcatatacatattatgttttcaccaatgcatcttgaggataagatagattctgacaaaaaagtgttaattacatgtcacttttctagataccaagtggtcaaattcttattctttataacactaagtactcaaaggaaacaaaaattaaaagataatttatctaaagtaaatgtagttctactggtataaagtaatggtgggggaagaggttagtatatttcatctctcacagtaaacgtttccaaatcaatctataggaatacttattagcagaggccaggcgcggtggctcatgcctgtaatcccagcactttgggaggccgaagtgggcggatcacgaggtcaggagatcgagaccatcctggctaacaaggtgaaaccccgtctctactaaaaatacaaaaaataagccgggcgtggtggcacgtgcctgtagtcccagctactcgggaggctgaggcaggagaattgcttcaagccaggaggcagaggttacagtgaaccaaggttgcgccactgcagtccagcctgggcaacagagcgagactctgtctcaaaaaaaaaaaaaaaaaaaaaaaagaaatacttattagtagagttaatgaataactaccctctaggtctaatttctgtgactgtaagcctcttgaggatgaagaattaagcttaatttccttcagatcatgaccaacacagacacagcacatttagtgaatcattttcatttaataactgttctcaggactgattatcataagctgtttagtcctctgtttaagattttaatcttttcactgaattatgtttactgtggcttttaactggtagctactagtatctagaaatataaataatcccagtaatatgtattattagtatccctactgtatgtacactgactacaattattaaaagtttcaccttaaattgtatcaaagatagaattccaaaacaagtttcttattctatttctactttgatgttgctttctcttctaaaaatatctttcctctacaaaaccaagataaaatttgctcaatagagttaatggcctgaatttaaggttgtatcagccagacataaggggttatgacttatcctccaaaaacataaaatacttacgcgtctgttgtctttgtacacccatttagattcagtacttcaatgttcctgcagttttgtgcaaaggttctttgtaggaaagaaagtaagaggtttcaaatgaaataggccaaattccagtcattaaaaaagtaataaaatatattattattggtaatattgattgttgatatctgtgatactgtgatataaaggaaaaacatgtatttggtcttcatcttcggttcttggcataccatccctaaaatctttgtaatttcctgagtgatagtatcttttgttacaggttggtgagaagtaatcgcggtttttgccattactgctcatggcaaaaactgtgattacttttgcaccaacctaatataatatttggtcttcaattatgtctacgatcaaggaaactctgtaaaaacccctaaatgatagggatcagagagcttctgggttggtgaatgtaaccacgtgccaggaaggtagtacaccccaactccacaggacagaagctcctgtgcctgggacccttctagactctgccttatacacctcttcatattccttctacctcagcctccctaaatgctgtgattacaggtgtgagccattaagcctggccatgatttttcttttgagatggaatctctctctgtcacccaggctggagtatagtggtgtgatctcagctcactgcagcctccacctcccaggttcaagtgattctcctgcctcagcctcctgagtagctggaattacaggcacgcaccaccatgcccaactaagtttttgtatttttagtagagacagggtttcaccatgttggtcaggctggtcttgaacgcctgacctcaagtgatccacccacatcagcctttcaaagtgctgagattacaggcttgggctatcacacctggcttaaatgaattttccattataaattcttcaaacataactttaaaaattattttaaattaaaaaaataaatgattgcttatttatttatttatttttagagacagggtcttcctctgtcactcaggctggagtacagtggtacaatcacagctcactgtagcctcaacctcccaggctcaagtgatcctcctacttcactcagtatcccaagtagctgggtttacaggcatatgtcacctaacctggctaattaaaaaaagttttttgtagagatgggagccttgccatgctgcctagattggtcttgtactcctggcctcaagtaatcctcccacctagcctcccaaagtcctggggtcactgcccaggttagggttaaccataaccctaaaaaagaactaagctgggtgcagtggctcatgcccgtaattccagcactttgggaggctgaggcaagaggactgcttgagtgcaagagttcgagaccagcctggacaacaaaatgagaccctgactctataaaaaaattttaaaacttagccaggcgtggtggtacacgtcttcagtcacagctactcaggagagggaggattgcttgagtccaggagttcaagactatagtgagccatgattatgccagggcactccagcctgggtgatagtgtgagaccttgtctcaaaacataaaataaaaatattaattaatttaaaaaaaacttattcaaagctccaaaagaaccacttatgatggggaatctgggtttttttcaggcagtacttgttcttgtttactgttaaaactacatttcttattactggatattttcagattataagcaatgtgtggttgcatttttaataacttaggaattttaacgattttagccttttctgggtgagatggtgctgctcttcacttccatcaagaagattaatcaatagttatgtttttaccttaatgcattgtctcccactccaagacatccacgaagacttaactttcgtaaaaagcccccacatcgttttgaaatattctccactactcggccctgtaaaatgagacaggcaaacaaaaagataacccacctcattactttagaaaagaacacatactcatttttaacgatttataaacaaagagaaaatgcttctattatgacctaatttaataggaaaattgtaacttaccctgagaaagctttcctgattaacccctatcatttgcatcatgcctaaaccccatattcttattttgtttaacttgtaaaatatattctgtacttgagaaaataatgttctatagttctctttggcattatatgcatatatactgcctagctgggttaagctgcagctactgaaagacagcaactacattatttttttgtatcttttccaaaatgtttattatagtactctgcttatagtagagactcaatgaacatttaacaaaagctggtcaggggccaggcacggtggcccacgcctgtaatcccagcactttgggaggccgaggcgggtggatcacgaggtcaggagatcaacaccatcctggctaacacggtgaaaccccatctctactaaaaatacaaaaaactagccgggcgtgatggtgggtgcctgtagtcccagctactcgggaggctgaggcaggagaatggcgtgaacccaggagacggagcttgtagtgagcccaggtcttgctccactgcactccagcctgggcgacaaagcgagactctgtctcaaaacaacaacaacaacaacaaaaacaaaagctggccaggtgcagtggattccgcctataatcccagcactttgggaggctgaggcaggcaatcatttgaggtcaggagttcgatacaagcctggccaacatggtgaaacccaatctctactaaaaatacaaaaattagccgggcatggtggctcacacccgtagtcccagctacttgggaggctgaggcacaagaattgcttgaacccaggaggcagaggttgcagtgagctgagaccgcaccactgcactccagcctgggtgacaaaatgagactctgtctcgaaaacaaacaaaaacaaaagcttgctgaataattctgtgggcggtgttgctttaaatatttacatccatgaagggtatagaattgtgaaaaacaaaatcccatataatgccagtggatattattttaaaagcactttggttggttttgaactcctgacctcaggtgatccgcccaccttggcctcccaaagtgctgagattacaggtgtaagccatcccacgtgccctcaaaaaacctcatttaatccttaagaagccatgaagaagctatttatttctaccttcctgatgagaaggataagaaaaacaggagttcaaattcagtttaaaataatttaagtgtaagccattctccattttatagataataggctatactaggagataaaacatggggcaaaaagtgagaggaggaaaaaacttctctctctagcaaaaacgattcaataaatggctttggcctcattcaaccttcgttctccacaagaaattggctcctcaagaaccaaaacacatatctcaaaaaaatatatacgaacgccatcccaacaagttataactctatttattcctcagtaaacaaatataaaatgtcttcactaaaataaacatagattcaatgtttccactgcaaaaacaaacttttagtcctatttcaagaccaaagagtcctatttagtcctagtaatactaagtaattgtattatttcagtgaaataatctggctcattctcaaaaactgcagaaacccttggtaactttgggggttcctgtaaagttcagatgcactgaaaataatagttcctctctttaacgaaaatgagattaatatggctagggctaatctgttccatgctgtaattactaacatgaaaactggggccacacaccacataattatacctcaatatccctctggaaatcaaataggtcaattcgctgccagttactgccatccagagccagaacattccaggcctattttaaagaaaaagagacagaatgagcagaagctaaaattaaggggaaaaggcagcaatattcaagttcacaattcaaccaactaatgactaaaatggatccaaaaatttatcaggccctatccacttactcccaaatgatgtgtcttactcctgacccatattgtattctccaattagataatctcataaacgagtgggtactagaaactagcagctacaaaagatcttaggccaggcatggtgactcaaatttataatcccatcacttgggaggtcaaggtggaaggatcacttgagcccaggagttccagaccagcctgggcaatatagccagacccgatccctataaaaaaatttaaaaacttggtcgggcatggtggctcacgtctgtaatcccagcactttaggaggccgaggcaggcggatcacctgaggtcaagagttcgagaccagcctggccaacatggtgaaaccccgtctctactaaaaatacaaaaattagccgggtgtggtggcacgtgcctgtaatctcagctactcaggaagctaaggcaggacaatcacttgaacctgggaggcggaggttgcagtgagccaagattgtgccactgcactccagcctgggcgacagagcgaaacttcatctgggggggaaaaattaaaaaaattagtcgggcatggtggcacacaactgtagtcccagctattcgggaggctgaggtgggaggtgagccaggaggtaagggctgcagtgagccatgatctcaccattgtactccagcctgggtgacacagcaagaccttagcaaaaaaacaaaaaacaagactaaccctccctccccccgcccacgcacacttaaattagagaagttaaggaaagggcaagttgtgataagtatcatagccagaaggtattttctaactggaaaattctagtttctaatcccaaaatgagacaaaagttcagtttatgaaaagcaagtctttcttctatgcttaaaaatatgatccttaaaaaaaatccttctatctggaaaaatatgaaggtaaaaccaaacatcaaaggggacagtactctgaatattgctctattctcactctctttttctatatatagagtatatatatagagaaatatatgtatttcttgagacacggtgtcactgtcacctgggatggagtgcagtggctcaatcatgggtcacttgcagccttgacctccccgactcaagcaatcctctcacctcagcctcccaagtagctggaaccacaggcatgcaccaccgcatttggctttttttttttttttttgagacggagtctcgttctgtcgcccaggctggagtgcagtggtgcaatcttggctcactgcaagctccacctcccgggttcacgccattctcctgcctcagcctcccgagtagctgggactacaggcatccgcctccatgcctggctaattttttgtatttttagtagagatggggtttcactgtgttagccaggagggtctctatctcccaacctcatgatctgcccgcctgggcctcccaaagtgctgggattacaggcgtgagccactgcacgcagccctaattttttaaattttctgtagagatagggctccctatgttgcccaggttagtcttgaactcctggcctcaagcaatcctcccatcttggcctcccaaaatgaagggattataggtgtgaaccaccaggcccagccttagttcagtacttctttgctatctatatcctatcaggtggtaggacttacaactgtgatatagtgatttgggacttagaaaagatactatcattgctctgaaactatttttttttttttgagacagagtctcgctctgtcgcccagggtagagtgcagtggtgtgatctcggctcactgcaagctccgattctgcattaactgtgaatcttactaactagaattactggtgaagcaaacttatccatcgagactatctggtatgtgttacgcatgtattctgttggtgctggaagatgtctgtgtgcctgcatcaacatgtgacttcatgtaaagtttcttcatgttcacagttcttagcaaatgcagtttcaatccatagatagccagcagtggatgttactacaggaaaatgcaagattaaaattgtccttgtgtaaaaaaaaaaaatgaactaggaaaacataataaaacaagatttcatcacaattttgagtcaagtctaaacttttaatatgcatgtttattgctttttcatcgaaaatgtttcctgtttatattacacaaataagagatacaaaaagtcagagacagtatatatagtagaatcccatcataaatttacatgggtttgggtatgtcattggtgaaataatctcctttaaaacatgaaaacatacaagtaacacctaaaataaatggatggcctatgaaagaggctgttatcatcagtatgaagaaggggtccccctgtaactatgccaacaatacttaccctggagacctgagcacagcggcacagggtaacaacatctagaaaagaaaatatcctaaaaagaaaagagagaaagacaaattttattgtatgataaagtagttgacctttatttattttgagacagggtctcactctgtcagccaagctggagagcagtggcataatcactgctcgccccagccttgacttcctggggtcaggtgatcctcccacgtcaagctcctgagtagctaggactagagatgcgtgccaccatacctggctactttttaattttttgtagaaacggggtttcaccatgttgcccaggctggtctcgaactcttgggctcaagcaattggcctcccaaattgctaggattacaggtgtgaactattgcacctggtcagtatgataaagtagttgctcttgattttagcatagaaataacagactacatgtatatacacacacaaacacaaaggcagttctttagaagaaacacacaaaatgcttgagcaatctgtgaagataatactgcccatataaaacacagtgggaaaaaatgttttacttgataatgtacatacagatgctgaccaagttcaattacctacaccaaaggataataaataatctctagctggtttttttaaagtaaaaaaaaaaaaattcccacctaaaattatcaaaagaaagaagccaggggaaggatctttttttgttttgtcttgtctgaagacagggtttcactctgtcacgcaggcttgagtgcagtggcacaatcacagctcaatgcaaccttgacctcctggacccaagcaatcctcccacctcagcctcctgagtagctgggataacaggcacatgccacaaagcctggctaattttttaatttttttgtagagatgagggtctccctatgttgcacaggctggttttgaactgctgagctcaagcaatcctcctgcctcagactaccaaagtgctaggactgcatgtatgagccaacatgcttggatgggaaggatttttttatttgaaacaaggtcttgctcctgtcacccaggttggaatgcagtggtgcagtcatcattcactccagcctcaatcacccaggctcaggtgattctcccacctcagcctcccaaatagctgggactaaaggcgcatgccaccatgctcagctaatttttttttgttgttgttgttctttttgtttgtttgtttttttgagagagactcacccggctgtccaggctggagtgcagtggcatgatctcggttcaagtggttgtcgtgcctcagcctaccaactagctgggattacaggcatccactaccacgcccgggtaatttttgtgtttttagtagagatggggtttcaccgtgttgggcaggctggtctcaaactcctgatgtcaggttatccgccctgtctcagcctcccaaagtgctgggattacaggcgtgagccaccacacccagcccctgctgggaaggatcttaatgaagtattttacagttatgaagaaaaaaagataatttaataaagcctaaaaaacagcaatgaaaaatgttaaatgtctagaaaaaaaaacccagaaacaaaatataaattaaaaaaagttagatctctacatatttcattctaatttaataaattacaagactcctttaacacagcaatgttagaaaatatttactgtctagaatttttctcagccttatagaaggcaaataagtatttattttgaagtagaccaataagttatttgctgaaagcctgataaaccacaccataagctacctgtgcaaatagttcagggaatcctggaaataaaagtgaatgggagatcaggcaaggtggctcatgcctataatcccacctctttgggaggctgaagtggaaagactgctagaggccaggagttcaagaccagcctgggcaacacagtgaggctccctattttaaaaaagaaaagaaaaaacatagctttggctaggcatgatggctaaaacctgtaattccaccattttgggatgtgagggcaggaggataacttgaggccaagagtttgagaacagcctggaaaatacagtgagaccctgtctctacaaaaattttaaaaattaagccgggaacagtggctcacgactgtaatcccagcattttgggaggctgaggtgggtgggtcatctgaggtcaggagttcgagaccagcctgacaaacatggtgaaaccccgtttctactaaaaatacaaaattagccaggcgtggtggtgggggcgcttgtaatcccagctactcgggaggctgagacagaagaatcgcttgaacctgggaggtggaggttgcagtgagccgagatggtgccattgtactccagcctgggagacaagagtgagactgtgtctcaaaaaacaaacaaacaaaaaaaaacaaagtagccaggcatgctggtatatgcctgtagttccagctacttgggaagctgatgtaggaggatctattgtgttcagtttgaggctgcagtaagctacaatcacagcactgtactccagcctgggtgatagagtgagttcttttttttttttttaagacggagttttgctctgtcgcccaggctggagtgcagtggcaccatctcggctcactgcaacctcagcctcttggggtcacgtgattcgcctgtctcagccttccgagtagctgggattacaggcatcccaccaccacacgccaggctttaaaacaagttttaaattttgatgtaatccactttatctattttttctttcatttcctgaacttttggtgtcaaatccaagaaatcactgctaaactcaatgtcatgaagtttttctcctgttttcttccaaagattttataattttagttcttagatataggtctttgcaagaccatttattgaaaagactgtacttttccccactgaatggtcctggcatttttgacaaaaatcatttgaccatatatgtgaaggtttatttctgagctctctattctattccattggtctatgtctgctttatgccagtatcacactattttaaatattttcagttttgaagcagaaagtgcttttggtgattgaaatatttgcatgatgtcagaaaaactattaatagcaactgaactggtttcaagaatcttcccttaggttttcttacacatttacttcctctaacagatttctgatattttgatttttctccaactgtagaggcccatgtaagggactgtttaaaactgataataaattaaataagctgggagggttaagcaaggagcaacacggaaagcaaatataactgatctatatcctgcaatctcagcaagacaccagcaagggacaggaaaatccctgaataaaagcccagagaccaattatagtgaataatgtctagagaatctgccttctctaaggagaaccggataggtggatacaaaagggggaaacatctagttaaaatgatgagcagtatctgaagctgtggttataatttttcagcttgcctgaaaggaaagaaaaacattctgatttggagggtggtgagtttcattcaaaaaacatttttaccacctgctatctacgggcactgttttaagtccctactgttgagtaactcacggcataggggctggaggtagataaaaaataagtaaaatatatgagaaaatttcaattagtgatgagtactataaaaaacataaagctgagtaatgtgatagaagggtggtcaaggaaagcctcccctaggagtaggtatttgatttaagatctaaatgatcaaaggaaacagattgccaagatctggggagaagagcattccagtagacgaaatagtgggtgtatgacaaacgaatgtttgaagatcagaatagacagtgaagctggactgcagcagcagcacaaccctatactgagttcttaattatgtaccaggtatcattctaagtgtgtaaatttacatactaatccaatgactccttaaaacaattctataagataggtactattagcattcccatcttatagatgaggatattgaacaaacttctgttagtcaagggccagaatatgttaaaaaaaagactgggcgcagtggctcacacctgtaatccccagcactttgggaggccgaggcgggtggatcacctgaggtcaggattccaagactagcctggccaacatggtgaaactctgtctctactaataatacaaaaactagctgggtgtggtggcaagtgcctgtaatcctagctacttgggaggctgaggcaggagaatcgctacaacttgggaggcagaggttgcagtaagctgagatggctccactgcactccaacctgggcaacagagcaagacatcatttcaaaaaaaaaaaaaaaaaaatttaaaagactttgtggacatagtaaatgatttcaactgtattctaagtctaggggaagccaggccaggcatggtggctcacacctatatataatcctagcactctgggaggccaaggcaggtggaggatcacttgcggccaaaagtttgatctttttttttttttttcctaaagacagggttttgccatgttgcccaggctggtctcgagctcctgggctcaggtgatctacccaccttggcctcccaaagtgcgggcattacaggcgtgtgtcaccacacctggcccatggccaggagtttgaggccagtatgggcaacacagtgagaccccgactctgtaaaaatgaaaaaatttagctgaggattgtggtgcacgcctgtagtcctagctatccagggggctaaggaaagaggatcacttgagctcaggagtaagtggctgtagggaactgtgatcaccccactatgctttggcctgggcaacagagccagactgtctcttaaaaaaagaaaaaaaaataggtttctattagaatggtgggaaataaaaaatcaaaaaaatttttaatacaataattttttttttttttgagacggagtcttgctctgtcacccaggctggagtgcagtggcacaatcttggttccctgcaagctccccctcccagattcatgccattctcctgcctcagcctcctgagtagctggcactacaggcgccgaaccaccacgcccggctaattttttgtattttcagtagagacggggtttcactgtgttaatcaggatggtctcaatctcctggcttcctgatccacccgcctcagcctcccaaagtgctgggattacaggagtgagccaccgcacctggcctacaataaaaaattttttaaaaggtagagaggaatacacccattcatacaagtattataggcatagccttgaggcttctgcctcagcctcccaagtagctgagattacaggcatgtgccaccacgcctgactaatttttgtattttagtaaaagccttgaggcttttaaaagtctaggattccttattaaaaagttccagcaaagccattttttttaaaaagggtctatatggccaatcactattcttgttgcactttatgcaaataatcaggccagatataataggactaaaagttactttgcacacaaattgattactacaatttgtctctgatagaaataagggactgaagagaaaaatattatgcttctaaagaaaactataccttgtatcagattccaaccccgaccactgtttttgagttatcgtctataattcagactgagtcctgaattatctctaacagtggcctctaacaaacctggatatatatatttaaaaccttgttttcatggatcccatcaggaataagatctatttttgaaggattacttaaactaggacttatacttctatacatgctgagatttctcttccttcttgtcaaggtctgtacctgctgtttgtctattatttttattttatttatttatttagagacagagtttttgctctgttgcccaggctggagtgcaatggtgcgagacagctggatcacctgaggtcaggagttcgagaccagcctggccaatatggcgaaaccccgtctctactaaaatacaaaaattagccaggcgtggtggtgtacgctgtaatcccagctacttgcacaggagatttgtttgaacctgcgaggcgcaggttgcagtgagccgagatcatgccgctgcactccagcctaggtgacagagtgagactccatctcaaaaaaaaaaaaaagaaaagaaaaataaagaaaagagaaagaaaaaaaagaagaagaacaagaaaaaacaacttaggccaggtgtggtggctcacacctgtaatcccagcattttgggaggctgaagagagcagacagattgagactgagcccatgagttcaagaccagcctgggcaacagggcaaaaccatgtctctacaaaaaatacaaactacctgggtgtggtggcgtgtgcctgtagcctcagttactcgggaggctgaggcgggaggattgtttgaatcaaggaaacagaggttgcagtgagctgagatcgccccactgcactccagtgacagaatgagaccctgtctacaaatttaaaaaaaaaaaaaaagaaaagaaacgaaacaacttgctgaaactccttctgcttgtaagatcacaaaactgggtgacatcagctggaaccaatgtgtccaactggagtctgcatagaaccagtttgccgatgtcacagctagaatttccatcacgtttcatactaacttcccctgaatttgcacatgcaatccatgacgtagcatgaaaagacagccatgcatgcctgaagactttccagacctcccctttccttccgccagttacctaatctaagaattcatcccctaaaccttttctaataaaattagtgcattaaagccagcacagggcaacagatttgagctggactcctgtctacgtgttagtcgacttgcaataaaaatctttcctttactcaaaaactcagtgtcgggtaggcacagtggctcatgcctataaccccagcactttgggaggctaaggcaaggaggattacttgagccctggaggttgagaccagcctgggcaacacggtgagaccctatctctacaaaaaaacacaaaaattaggctgggcttggtggctcaagcctgtaatcccagcactttgggaggccaaggtggatggatcacttgaggtcaggagctcaagaccaacctgatcaacatggtgaaacccagtctctactaaaatacaaaaattagtcaggcatggtggcacacgcctgtaatctcagctacttgggaggctgaggcagaagaatcgcttgaacccaggggggcagaggttgcagtgaactgagatcgcgccactgcactccagcctaggcaacaaagtgagactctctctcaaaaattaaaaaaaaaacacacaaaaaatcagctgcgcatggtggtatgcacgtatatgtagccccagctactccagaggccaaggtgggaggatcacttgaacccaggagtacgaggttgcagtgagctatgattatgccactgcactctggcctggacaacagagtaagcctgtttctaaaaaacaaacaaaaaaacaaaaccccgtgtcacaatattagttttgagtgcatcaagcagcaagcctcttttgctcagtaacaaaacttttggcttttaaatttagctgctgcagtattttatcttctccttacctgtcatattatttattttcccttctttcattacactttactgtccttttaagcatttctgattttttcttatttttcatctctttgtttccaagtcttacctgggttctctattaagactcttttttcttttccttttcagtttctaagtggcaggcaagggagggtatcaaataaccaggaaaggttgtatgtctttcttcttcccttgagacaaatttgctaccaccctgatggttctccttaataaattttctatcttcttcaatattgattatccaactccactcccaaataaacatatatacttccaatctaggtaactcaattcccaaaacaaaaaatttatctaatgtaacaaacattacattgatgaaatgctgctgctttttcctgtcattcactaaactgtacttttatgaggagcttcataatctaaagattcttaggtttgccaaaacatcactaactcctgagcaatttttataaatattatatgggggtggcaggagtcacaggtgagaggctttacaagcaatgatcctaattagactttagtaacctttcaagagaaaggttctctatgaaataaagcacaatagacagacatgaaacatcaggttggtagtcagatgtgtgcagacttaggagtaccattaaacacacatctcaacaatcctaattctgttcttagaatgtcctgaaggggttctaagtattaagatgtcattgagttagcttttcacttggatttgaacgttttagagcatttaaaaaattaagaggagaagacaaatatagtcactatgttcctctattaaagtagtaagaactggccgggcatggtggctcacgcctgtaatcccagcactttaggaggccgaggcaggcggatcacaaggtcaggagtttgagaccagcctggccaacacagtaaaaccccatctctactaaacatacaaaaattagctgggtgtggtggcaggcacctctaatcacagctatcgggaggctgaggcaggagaatcgcttgaacccaggtgatggaggttgcagtgagccgagattgtgccactgcactccagcctgggagacagacctatactccatctcaaaaaaataaaaagtagtaagaacttagtctttacagttctaatctggctccctagtaagatggatataagcctcagcacttaaatcccttctaccactctacatctagtatgtctaagtatttgctattatttagcaaccctttaaattctatctttttttttttttttttttttttgagatggagtctcactctgtcccctgggctggagtgcagtggcacaagctaggctcactgcaagctccgcctcctgggttcacgccattctcctgcctcagtctcccgagttgctgggactacaggcacctgccaccacgcctggctaattttttttttgtatttttagtagagacgggtttcaatgtgttagccaggatggtctccatctcctgacctcgtgatccgcctgcctcagcctcccaaagtgctgggattacaggcgtgagccactgtgcccggcctaaattctatttattccatatatttgataatgaagatagttacttttttttttttttttttgagatggaggcgcatcctgttgcccagactggactgcagtggcgcgatctcggctcactgcaacctctgtctcccgggttcaagcgattctcctgcctcagcctcctgagtagctggaattaccggcgcgcaccatcatgcctggctaattttattatttttagtagagatggggtttcaccatgttcgtcaggctggttgcaaactcctgacctcatgatccgcctgccttggcctcccaaagtactgggattacaggtgtgagccacagtgcccggccatctttttgtttttttcttaatttgtattttttctgagatggagtctcactctattgcccaggctggggtgcaatggcgcaatctcggatcactgcaacctccacctcgctagttcaagtgattctcctgcctcagcctcccaagtagctggaattacaggcgcctgccaccacgccagctaatttttgtatttttagtagagacagcgtttcgccatgttggccaggctggtctcaaactactcacctcgagtgatccgcccgcctcggcctcccaaagtgctgggattacaggtgtgagccaccttgcccagccgagataattatctttagaaaccaaaataaaagaattggtggggtaggctgccagggttttagctactacagcaattatttttttccctcataacaaacatttatttatttttacttttttgagacggagttttgctcttgttgcccaggctggagtgcaatggcacaatctcggctcacagcaacctctacctcctgggttcaagcgattctcctgcctcagcttcccgagtagctgggattacaggcatgcgccaccatacccagctaattttgtattttaagtagagatgcggtttctccatgttggtcaggctggtctccaactcccgacctcaagtgatctgcccaccttggcctctcaaagtgctgggattacaggcatgaaccacagtgcccggcccaaaatttatcttttaaaatacacactttaaagtgcataattcggtgattttttttagtatattcacagtgttgtgcaaccatcaccactatgtaattccagaacatttcaacaatctcaaaagattccctgtacccattagcagtcactctctatcccttcctcacccaaactcctggcaaccactaatcaacattatttctctatagatttgcctattccgcacatttcatataaatggaataatactgtaatgaagacttttgtgttggctttcacttagcacattttaaagaatatatccatgttgttgcacgtattcatacttcattcctttttatggcggaataatatcctactgtatccattctccagttaatggacaattgggttattttaactttttggctattatgctttttgttttttcagagacgagtctcactctgtcacccaggctgtcacctggctgtagtggcgccatcctggttcactgcaacctcctcctcccagattcgattctcctgcctcagcctcctgagtagctgagattacaggcacaaggaaccacatccagccttgtgcctgtacaaattttgtatatatagtagagacagagtttcaccatgttagccaggctgatctggaactcccaacctctagtgatccacctgcctcggcctcccaaagtgctgggattacaggtgtgagccatcacaactggccagttatgtggtatttctatatttagagattttagaaactgccaagctgtgttccacagtggctgtaccagtgtacactgtagtgtacattctcacgagcagtttgtgagggttttaatttctccatatccttttcttttttttttttttttttgaaatggagtctcactctgtgttgcccaggctggagtgcagtggcacgatctcagctcactgcaacctctacctccctggttcaaacgattctcctgcctcagcctcccaagtagctgggattacaggtgtacactaccacacccggctaatttgtgtattttagtagagacggggtttcaccatgttggccaggctggtctcaatctcctgacctcaagtgatctgcccacctcaacctcccaaagtactgggattacagggttgggctactgtgcccagcttaatttttgtatttgcactagagacagggtttcgccttgttggccaggctggtctcgaattcctgacctcaggtgatccgcctgcctcggcctccacatccttgacaacactttttgattacagacatcctagggagtgcgaattggtaccccattgttgttatgattggcatttccctgatggctaatgatgttgagcatcttttcacgtgcttattgaaagcagtacgcttttagtaaggttttcacaaactacctcaggagggaagattattaatgggcaaagtttaaataatttatatatatatatatatatagtacatgtctttaaaacatatataggtacacgttttcttcctcttcctttcctttgttgaaagagtcagttctaaagccattaggaggggcatagaaaggtaggtatcaatgccaggttagaggttgggtgcagaggcttgaacaatacgtcggagtccaagcagagtgaggagaggacccttgaggagggtgacctagcaggagatactgggatacaagcagggtgaatgggcagccttgggtagagtgtcaaagtaaggtgagaagggcatccacacagaggataaacctagtgcgggctttagaacccaagcaggactttgtccgtgcaacaggaggaaggtggcatggcatgaagtgcccaaacccaatgaagtgaagaggggatctttgagagagagtgagagagagagacagagagagagagagagagagagagagagagagagagagagagcaactgtagagcgaaattggttaaaatcaggggaactgagtaaataataaaatacattaaccataataaagatgggcaaggtggctcatgcctgtaatcccagcttttggaaaggccaaggtggatcacttgaaccttagagttcaaggttacagggagctgtgatcatgccattgcagtctagcccggttaacagagcaagatcctatctctaaaaacaaaaaaacatgaaccacaacagaagttaggtttctgttacaaagggagatgtgaatctggaaagggagaaaactagactaaattatgcagtgttggattggaattggaaatatcagtgtattaatagaaacatagttatcaatatatacagatataaacatacatgtaaattgtgtacatatatacacgtgttcatctacatatacacacacacacacacacacatttttttctttccccccgagctctgtctactaagagggcctggagcaataacccctcaatggcaatggtatttaactcccagatactggcttctaaacatttctttctagtagaaggaatcagggctccttggagaaatagggcagagaaaatgtacgatgagcctggaacaccttgtgatagaaagcaagtgagtgctcaaagaatgatggggacacgtcaaaaagtcatggtaaccagcttgaaggggcttccactggccaaatctgggacaacctgaatatgaaaacaaacgagagcaatgaattacaatttactaaataaaaaagggaagccataagttcagactgatgtaaattaataaactgaagtttaagaagaatgggacggctgggcacggtggctcacgcctgtaatccaagcactttgggaggccaaggcgggggtgggccacctgaggtcaggagttcgagaccagcctggccaacatggcgaaagcccgtctctactgaaaatactaaaaatgagccgggcatggtgctgggcgcctgtaatcccagctacgcaggaggctgaggaatgagaagcacttgaacctgggaggcggaggttgcagtgagcggagattgcgccactgtgctccagcctgggagacagagtgagactccatctcatttaaaagaaaatgaagacaagaataattaaccaaacataagatgttcttggatagcataatttaatatcttagaagataccaatacttcccaatgtaatttaatttcctgattaaatgtccaatatatgaattgaatccaaacagatttttgcttaacgaaaaaaattgattctgaagttgatatggatgaaaaatgtgtgaaaatcaccaagaacttattaaaaaagacaaagaagagctgcttttctttccccccatgagacagagtctcactccatcacccagggtggagtgcagtggtgctatcttggctcactgcaacctccgcttccggggttcaactgattctcctgcctcagcctcctgagtagctgggattacaggcatgtgccaccatgcctggctaatttttatatttttagtagagatggggtttcaccatgttggccaggctggtcttgaacttcttaccacgtgatccgaccgtctctgcctcccaaagtgctgggattacaggcgtgatccaccgtgtccgaccaaggtgcttattaaaatgtacaaaaattactgaattccaaataatatggtgattataaagaaggaaaaaaaatgatggaacaaaacagggcatccagaaaggccccagatacatgtaggaatttaatacataggagagtttgactttgtttttttttttgtttttttttttgttttttttttttttttttgagacggagtctcactctgtcacccaggctggagtgcagtggcacgatctcggctcactgcaagctcctcctcccaggttcacgccattcttctgcctcagcctccccagcagctgggactacaggtgcacgccaccacgcccagctatttttttgtatttttagtagagacggagtttcaccgtgttagccgggatggtctcgatctcctgacctagtgatccgccctcctcgcctcccaaagtgctgggattacaggcgtgagccaccgctcgcggcctcactttcaaattagtaggaaaataatgaattatttagtaaatggtgttaggaaacctcatatttgaagaatgtaaaatccctgccctcaagccatataaaaaaaaattcctatgatagctttattggcaaaatgttgacaattattgaagtggggtaacaggagtttcattataccatgttgtctacttttgtgttcgttggagttaagaattccatgagaaagagtagattttagtggataagaacaaaggaaggcaggttgagtttttggagtatgcctaaagaatgagaagctggtctgcatctttgataggatgtggtaagaatcctcaacaatagtctaagactatcagaattccacatagccaagtccttggaaagcccttaaccttaaaagtgttctgtgccactaaattttctgttacgaacattttaccacaattaaaaaaacaaaacaggccaggcacggtggctcacgcctgtaatcccagcactttgggaggccaaggcaggcagatcacctgagatcgagagttcgagaccagcctgacgaacatggagaaaccctgtctctactaaaaatacaacattagccaggcttggtggcgcatgcctgtaatcctagctactcaggaggttgaggcaagagaatcgcttgaaccagggaggcgaaggtttcagtgagccgagatcatgccactgcactccagcctgggcaacaagagccaaactccatcttaaacaaacaaacaaacaaacaaagcaaaaaccttctgtaccataatgctgaaatagttcataagcaacttcctcttcttcttaaataaacccagaaactccctaaaaaagaagctcatagcaaaatgtaagcggaaatctccttattaaaatactgagaagtctttgttatttccaacttaacaatcagcaaaaattttattacaagacaatattaaaaagaattctgagccgggtgtggtggctcacgcctgtaatctcagcactttgggaggtcgaggcaggcaaatcacgtggtcaggagattgagaccagcctggccaacatggtgaaaccccgtctctactaaaaatacaaaaattagctgggcatggtggagcatgcctgtaattccagctacttcgaaggctgaggcaggagaatcgcttgaaccagggagtaggaggttgcagcgagttgagatcgcatcactgcactccagcctggcaacagagcaagactccatctcaaaaaaaaaagagagagagagaattctgcctctcagagaattattaatgtttaaggatagtttttcaaatttcagataatagcaactctacattctaagattaccttacaaaatggccactaaagcccaatgaagagagatttaaaaaggatagcagggctgggcacggtggctcacgcctgtaatcccaacactttgggaggacgaggtgggcggatcacaaggtcaggagtttgaggccagcctcgccaacttggtgaaaccccatctctactaaaaatacaaaaattagctgggcgtggtggtaggcacttgtaatcccaactagtcaggaggctgaggcaggacaattgcttgaacctgggaggcagaggttgcagtaagccgaaagcatctggcctgggcaacacagcaagactccatatcaaaaaaaaaaaaaaaaaaaaaaactatagcagagggcagaactgggaggaggtagtgaaggccagaaaaaaaaaaaaaatagaacagcagggacataaatcttttcattattatttttaaaatagagaccgggtctcgctgttgcccaggctgctctcgaactcctggcctcaagcaatcctcccacgccaacttcccaaagtgctgagattgcaagcatgagccactgtgcctagccaatccttttactaagtctaatactgtgtattacacttactttgacgggctgattttaattgaaaaacacacagatggtaatatacatactgtaaaaagtcccttctgtccttgagacagtcactgttgcttatttattttcccatgaattttctgtccctacaaacaacatacatacacgtacacacagattttgtttcttatataaactagttttgtaacttgctttgttgacacaatagatatgcaaataattttttatcaaatactgtctgcctcttgaagaattctgtgcaaaatttggtagatcaactatctatacttgccttgttaaaaatcaacttaaatttttttggtatcaagtaaaaataattaaaaaaatatgtttatagctactttaaaattttaaaaaccctttaatttttggaggtggatctctatttgatcatacttgcctgtctgccttcatccattccctccttcctgaagacagtaacagaggcataaaagataagtggtatatactgacctcacagcacggtttaccaacttctgactctaaatatttcacacataactattagcataagaggcttttgaatataacttgtattatacagatggaaatattaaagcttagactgatttctgatagtgccctgtccagaatgtctagtatgaatttttttttttttttttttgagatagagttttactcctgttgtccagactggagtgcagtggcaagatcttggctcactgcaacctccgcctcccaggctcaagcgattctcctgcctcagcctcccaagcagctgggactacaggtaaatacaaccatatctggctaatttttgtatttattgtagagatggggcttcaccacgttggccaggctggtctcaaactcccagggttcaagtgatccactggccttggtctcccagaatgctgtgactacaagccgtgctcggcccagtatgaatactctacaacaaaaagtgactaacagccacacgtaactcagaagacaatatatagttttaataaaaatctttatttcatatttttatgattgcatttgctaagttctttttttgtttttttctctgaaagaaactagtatgtatttgttaagttcttggttgcctataaaacaattctgctccaaaatatacagtgaacataagtgaaaacttaagaatactcccagtatatttttgaagtccacagtcgacatgctgtataaaactaatcagtcagccaggaacggtggctcacgcttgtaatcccagcactttgggaggccaaggtgggtggatcacgaggtcaggagtttgagaccagcctggccaccacagtaaaaccccatctctactaaaaatacaaaaattagccgggcacggtggcaggcacttgtaatcccagctagtcgggaggctgaggcaggagttggaggttgaacctgggagttgaacccaggagttggaggttgcagtgagccaagattgcaccattgcactccagcctggcaacagagctagaatctgtctcaaaaaaaaaaaaaaaagaaaaatcagtctagggccaggcacggtgactcatgcctgtaatcccaacattctgggaggccgaggtgggtggatcacctgaggtcaggagtttgagaccagcctggccaacatggtaaaacctcatctctactaaaaatatacaaaaattagctgggcatggtggcaggcgcctgtaatcccagctacttgggaggctgaggcaggaaaatcgcttgaacctgggaggtggaggttgcagtgagccaagactgggccattgcactccagcctgggcaacaagagtgaaattctgtctcaaaaaaaaaaaaaaaaacaaaaataactgatcaggctatagtcatttcctgaagtaagcgtactatgactgaaactacctgattcaatgtttgaatttagtacaaggaaatcagttaccatattcctaaaaaatcagtaataattggtaattctaagataaatactcaaatctgtcccagttagaaccagcagtagatatttcatttgaacttgaattaattcttgatttgataataataatgtcttgctacaagactaaccacaagaccaaatgcctaggccgagcatggtggctcatgcctggaaggccaaggcaggaggatcacttgagggtagaagttcgtgatcagcctggaaaacatagtgagacactatctctaccaaaaaaaaaaaaaaaaaaaaaaaaaagccatgccccatgcttaatttcagttgtttcatgtgtgcatatgtgttttgtggggaaataattatttttaaaatactttgagactaacagactaaaatattcaaatgtataattatatggaagtgagctgttttacaattaaataaattctttaggtaatgacatatgcatcaacatattaaactcccaaaaagtttacaaaaagctgctgtttctccagaacatctaaggtgaatacataaactgagtattaaaatgtatgtaacctgatacctgtgaacatataaatttttaattaaaaaattttttaatttgactaaatactaagattgagaagtgtataaaagttaagtggatcgttatattgagtagttgattacaaattctcatgagtagaatactcccgtttaccttgtccagatgctcaagcactctgtgttaactactgggggttgtgagaattctctctttcagataggtaaagcatgttttgataggaacacatatctataatgagtaaaataatgaaactacttctgtaacccacataggaaataaaaaaaacaaacaacaaaactcaaaagttaacctcattaatgtttttatttatttattttatttttttattttttgagacagagtctcgctctgtcatccaggctggagtgcagtggtgcaatctcggctcactgcaagctccgcctcccgggttcacaccattctcctgcctcagcctctcaagtagctaggactacaggcaccagccaccacgcccagctaatttttttttttttttttgagacagagtctcactctgtcgccaggctggagtgcagtggcacaatctcggctcactgcaagctccgcctccagggttcacgccattctcctgcctcagcctcccgagtagctgagactacatgcgcctgccactgtgcccagccaattttttgtatttttagtagagatggggttttaccatgttagccaggatggtcttgatctcctgacctcgtgatccgcccgcctcggcctcccaaagtgctgggattacaggtgtgagccaccacacccagccttaacctcattaattcacagctttccagaaaaagccaagtcattaggtgtccctaaagttcttaattatatccagtactgtgtcagagaggaaattcagtaacaatataaaatatctgcttttcagaagcatatattcttgttgaagaaaacagtagacactaggcagcttattaagcaacataatgtgtgacctgaaaatataggtgctattgaaagtaatgaaacaatgagatcaagatgggtggggacagttaagaagggggttttctctcatcacctctttcttctttacaatctaattccggtctttactcaattgcaattgtaccttgaagaatactactgacttaattgtcaaggccttactattcaaaggcctttttcagttttcaataagcctcacccccttaaaatacaggacacaccgaccattccctacttattaagaatctcttctcctggcttctcagacaccaccttgttatgtctttagtatacttctgttttctttttttttttttgagatgggtctcgctctgtcgcccaggctggagtgcagtgatgcaatctcggctcactgcaacctcccaggttcaagcaattctctgcctcagcctcctgagtagctgggattacaggcacctgccaccacgcctggctattttttgtatttttagtagagacggggtttcaccatgttggccaggctggtctcgaactcctgacctcgtgatccaaccccctcccccccccaccccctggcctcccaaagtgctgggattaaaggcgtgagccaccgtgcctggcctatacttctgttttcaaatgaaggcatgtcccaagatttagttcttattcttacacttcaccgtgtactaaagaacggctcatgaatcaactgcatcagtatacctggagtgcttattaaaatgcagattcctgggtcctagctcggacctacagattcctctaggtgagagacccaggaatctatcttttctaaacattctctccaggtgatttttcttttttttttagacaagagtctcacactgtcacctaggctggagtgcagtggcaggatctcggctcaccacaacctccacctcccaggttcaagcgattctcctgcctcagcctcccaagtagctgggattacaggcacttgccaccacacccggctaattttttacatttttggtagagacagggtttcaccatgttggccaggctggtctcgaactcctgaccttacgtgatctgcccgcctcccaaagtgctgggattacaggcgtgagcaatggcgcctggcccaggtgtttcttaataatattaaagagggatcacctaactactataaaaacatttataaaattgtgaatttagagtttggcaattcatttttttttaaagaaaactgcagaacaagtagacatttctcttttaatcctccaattaagttgtgaaatgtatcaggatagaaatgtgacaacagtgcattgcagcaaggtttgatcattaacttacaaattctaatctccagatgaagatgaaatctcttaatccaaatccaactgataaaaaatgaatgtcaatgatggcatttgagatttaatactcaaaaaaagtcaaggtcaagaatcattctttaggccaagtgcagtggctcacgcctataatcctagcactttgggaagtgccaaggaaggtggatgggtttgagctcaggagttctgagaccagcctggagaatatggcaaaactctgtcactacaaaaaatacaaaaattagccgggcgtggtggcaggcacctgtagtcctagttactcaggaggctgaggtgagaggatcacctgaccctgggaagctgaggctgcagcaagctgtgattgtgccactgcagtccagcctggatgacagagaccctgtctcaaaaaaaatagtagtaataatcattcctcagacaaaactcttgtgaaatgactcaaaatgaaggatgagaatggggtagaaagaaggttggagtggagagacatatcttttaagtaatacctttttgtacagatctgactcttgaaataacatgttttaaataatcaaacataaaattggtttcacttctggtcacggctgagtaagcttccactgaactaaccttccaggtacaattataaattgggaatgaaatattaaaaattaccacctgaatgtattggaaagtgaacaaaaacaggtagatattaaagggagaggggaatgacaatttctagttttacagcatttatcctgagggcaggttatatttgggaccctcagaacatttagaaaatggatagaaacctgcaaaggaaaactagagaacagaatttggagcaaccacattgtaaattgtagagagatccaatgtgaggcaacataaattctgttcaaattactgactgacctctgaacactgcacgcacagggcagactccaagcagctaagggtaaaagaatttaacttatatttgagctggcacccatgacaggcagtttgggtacagcaaagttaactatctgctaaaaaaaaatacactgaataaggataaggagaaaaatcctgatatagtttgaatgtttgtccccttcaagtctcatgttgaaatgtgatccccaatgttggaggtgggacctagtgagaggtattagatcatgggggcagatccctcatgaatggcttagtactacccccttaatcataagtgagttctcctccagttgttcatacacgatctggttgtttaagagtctgggacttccctcttttctctcttcctctcttgccatgtgataagcaagctccccctttgccttctgccatgattagagacttcctaacttctcaccaggagtagacgctagtttctggtataggctgcagaatcatacgccaaaaaaaaaaacctcttttctttataaattacccagtctcaggtatttaattatggcaatgcaaacggactgacacaaatccaaaactgaatacgaaaataaatgagtaaaacaaactatattctaaatgaataacctaaagaactaatcaaagttaacttaaaaaaaaattcttggtcaggtacagtggctcatacctgtaatcccaggcgttccaagccagcctgggcaacatggtgaaaacccatctctacaaaaaaatacaaaaattagctgggtgtggtggcacccacctgtgatcctagctactaggagggctgaggtggggggatcacctgagactgggaatatcaaggctacagtgagccataatcacgccaatgcactccagcctgcgtgacagagcaagaccctatttaaaaaaaattttttagagatggagtcttgctctgtcacccaggctggagtgcagtgatgctatcatatacctcactgcagcctcaaactcctggcctcaagcaatcctctcgtctcaacctcccaagtagttaggactacaggtgcacgccaccacacccggctaacatatatacacacacgcttttgtagagacagggctctcactatgttgcccaggatggtcttgaactcctggcctcaaacaatcctcctgtcttggctttttttttttttttttgaaacaggatctcactctgtcacgcagactggagtgcagtggagcatcttggctcacgacaacctctgcctcacaggctcaagtgattgtcctgcctcagcctcccgaatagctgggattacaggcatgtgccaccacactcgtctccactaatttttttatttttagtagagacaacgtttcactatgctggccaggctagtcttaaactcctgacttcaaatgatccacccgccttggcctcccaaagtgctgggattacagacgcgagccaccgcacccagccctgtcttggcctttaaaagtgttgggattatagccatgcaccaacatacccagcctcaaagttaacttctgaactcaatattttctttgtattatcaggctaaagacaaaaagcaaacaaaaaagataaataataagctccaattagattttcttcacagtgatatgggtaaatcactttatgtgctttctaggattaagtaaacatattatggagttatatttcttccttggagaaagaaaaaaatacagaaaggaggagggacagaatgaaccctaaggtaataaactagatattattggaggtgtcaatatgaactaggtatgtttgcttatgtaacaggattatcatagtttttaatctatccagccacctatacagatataaatatgggcagatataaaattacataagatgtacacacgcaccccccaaaaaccatatatttattaaagtacatccacaaggagactttaaaaaaaatacatctacaaccaaacatgtatttcttttttgttttgttttgttttttcaagacggaatctcgctctgtcgcccaggctgtagtgcagtggcacaatctcggctcactgcaagctccacctcccgggttcatgccattctcctgcctcagccttccgagtagctgggactataggcgcctgccaccacgcccgggtaaccaaacatgtatttcttagctctgtcttatgagaaagtctagaagcaatgccactcaggagcaatgagcatatctagaataaagactgtatagtttctggccaggcaaagtggctcatgcctgtaatcccagcactttgggaggccaaggcaggcgcatcacatgaggtcaggagtttgagaccagcctggccaacatggtgaaaccccatctctactaaaaatacaaaaattagccgggcgtggtggcgggtgcctgtaatcccagttacttgggaggctgcggcaggagaattgtttgaacatgggaggtggaggttacagtgagccgagatcacgccaactgcactccagcctgggcaacagagcgaaactctgcctcaaaaaaaaaaaaaaaaaaaaaaaaaaaagactgtagtttataaataccattctctactaaaaaaaaatacaagggctccttggagaaataactgattccaggactgaatcaagggaggtgtaagaagggtctgaaacaccttgttgtgccagaaaacaaggaagtgctcaatgaatgatgggaacatattcaaaggacaaaggacacagttggaaggggatcccactggctaaatctgaaacagtttgagcatcaaaataatgataacccaaatgagataacaatgcactgaatatattagcaatccatgaatccatacggatataaacacaaacaaataacaaaatggagtccaagagaaagctcttctttacaatggaactccaactaataaaatgtggaagtaacggtaaatttagaaaatcacaatcatattgcaactgcaatagtaataactgtttcaggaaagaatcaaattagtgagtcaaagttttatgagaaacaagatatttacaatgtcatggctaggcacagttgctcatgactctaattccagtgattttggaggcccaaggtggaaggaccacttgaggccaggagttcaagacagcctaggcaacataatgagatccctatctctacaaaaaatttaaaaattagctaggcatggtgaggcatgcctgtaatcccagctactcaggagacagaggtgggaggattgcttgagagcaggagttcaagggtgcagtgtgctttcactggcaactgcacttcagcctgggtgacagagcaagactctgtcaaaaataaaataaatacaatgtctcaaagtatttttaccataggacattctttaaacaaagggaaaaaaaagtaacatgacaacgaaaaaatctggcagatactcctcagacctaatgatcaaagctgacatcaccagtaagaggacaaacagacatcctatgcctatgttatgatacagttagaaggatactacttctatgatattctaacccaaatccataagttaaatttaataatgaaggacattctacaaagtaactggcctataatcttcaaaactgtcaatgttgtgaaagacaaagactgaaaaattgttgcagattaaatacatccaaagagaggtgacaaataaatgtaatctgagatactggctggaactgaatcaagaagaaaaatattttccccctttactataaaggatataaatgaaaaaatattaataactagaacagggtctctggattacataacagtactgtgccaatgctcgttatcttcactttgattactgtactgtggtgttttgtatctatctatctatcttagatatatatgtatatataatgtttttgtttttagaaaatactgcagcctttcaggggtaaaaagcatcatgtctataacttatctctaatggttcagaaaaaaaacagagggaaaaaaggtcgggtatggtggctcacatctgtaatcccagtgctttgggaggccaaggcaggaggatcacttgaggccaggagctcgagaccagcctgagcaacatagcaagaccttgtttctacgaaaaaaaattaaattagccaggtgtgatggcacatgcctgtagccctagctactaggctggaatgggagaattgcttgagtccaggagtttgaggctgcagcaaactatgattgtgtcacctgcactccaacctgggtgacacagcaaggctctgtctcaaaaaaatcaaaaataggatgggcgcggtggctcatacctgtaatcccagcacttttggaggttgaagcaagcagatcacctgaggtcaggagttcaagaccagcctggccaacatggtaaaaccctgtctctacaaaaatacaaaacaaatattagccgggcatgatggtggctgcctgtaatcccagctactcaggaggctgaggcaggagaattgcttgaagctgggaggctgaggttgcagtgagccaaaattgtgccattgcgctccagcctgggcaacagagcaagactctgtctcaaaaaataaaaaataaaaataaaaaataaaaaataggccaggtgcagtggctcatgcctgtaatcccagcactttgggaggttgaggcaggcggatcacatgaggtcaggaattcaagaccagcctggccaacatggtgaaaccccagctctactaaaactacaaaaattagccggacatagtggcgtgtgtctgtaatcccagctacttgggaggctgaggcaggaagactgcttgaacctgggaagcggaggttgcagtgagccaagattacaccactaacactccagtctgggtgacagagcaagactccatctcaaaaataatcaaataaatagattaattaaataatttgcttttaaagaaaaagaaagaaaatgaggggccaaacagggccaaagtctctccctgagagactaaaacatccaatgtactctagagagtgtttttatttttcctccaggaaatggaacaatgagcttgacaatattaaaacagatgactattaggcagaaacaaaccagggagaaaataacatcctacagagaggcagcatccaatttacaaaaggagtacatgtacaaagtttgtaaattctccaagagagataaatgatggttaatttgccaggcaagcctttaaaaataaaatcctaaattacaatactaggtactatgcaaagagcttgggcctcaaatcttgtagcatacctgaatcaaagtccttttcctctgcccacaaaaaggactcaacacaacaatctctctcatgggactacacgcatgtgccaccacacctggctaatttttattttcgttttgttttgttaagacagagtctcgctctgcgcccaggctagagtacagtggcatgatttttttacagcctccacctccggggttcaagcgattcttctgcctcagcctcccaagtagctgggattacaggtgtgtgccatcatgcccggctaatttttgtatttttagtagagatggggttttaccatgttagtcaggctggtctcgaactcctggactcagattttctgcccgcctcggcctcccagagtgctgggattacaggtgggaggtatcatgctcagcctaatttttgtatttttttgtagatacaggctactactctttaagtcacagctcatttgtctcatttctggggaagcattttctgaactctccatgctaggtttaaagccctacatgtgagattgctataatgccctaggcaaaacctcttttctagctctatattgattatttccatgcctgttctctctactgccctgtgagctccttgaggacagtgattgtttatttctatcttcagcataatgcctggaacactgtaggcactcaacaaatgtttgtatccacattaaagtttaaggaaaggtaatttaattatttctatacatctaatgtccctcataaagaacatcggttgtcatcccacatagagaaactctcctaaatgactaaatctgtttgtctcttcattaactaaacagccctgcactgtaatggtttgaatatttctattaccagtttttgtattttatacttttatatttaatccatttggcctgctacaacaaaatacctcagactgggtaatttataaacagcataaactcactttatggtctatgagtaaaaagtagaaccaatgtaacaatacatgcctaacaattttatagcatttactatgtgccgagcattgtgtcctcaattaacagcaagtgtatgacagaatccaggaagtcagattgtagagtccatgttcttaactattaatgcttttcaaaggaaggaaaacacagacttgtatttttccacaccttcaactcctagaatttaaaccgaaggagaggctacaagaaatataaaacattgtgtgcgagcttctctgaaatgaatatgagattgcacatgtgcagaaaagagttaacagagcaggcctaagaatgctatctttagaaatgcctgcttgcaaggttagcccctgaatggcacctaagccgctggattttggaagggttcctaccattcactgatgaacttctctaatggacaatatttcacatgtgtcgtcacaacttgctcctggaggaattaagtgcaccctgtgtggttccactgggaaaggaccctcggaagcttacttctagtttcctacacattttacctgtgcacctttcccctttgctgatttttctttgtatcttttttttttttttttttttttttaagacagagtctcgctctgtgcccaggctggagtgcagtgacgtgatctcggctcactgcaagctccgcctcctgggttcacgccattcgcctgcctcagcctcccaagtagctgggactacaggtgcccgccaccaggcctggctaatgttttgtatttttagtacagatggggtttcaccgtgttagccagaatggtcccgatctcctgacctcatgatctgcccaccttggcctcccaaagtggtgggattccaggcatgagccaccgtgcccagctgtatcctttcttataataaaccatagttgtgtgtatgactacatgatgagtcctgtggatcctcctgcacatcaccatacctgtggatggatctaggggaccccaacacagtatgaattgctgcctttttcctttttcttttttaagagatagtgcctagccatgttacccaggctggtctctaactcctggcctgaagcaatccgcctgcctcagcctcccaagtagctcagattataggcctgagtcacacctggctctctactattttagaaggaaaaaaattcagctctccctctccctctccctcctccctctccgtctccctctttgcacggtctccctctgatgcccagccgaggctggactgtactgccgccatctcgactcactgcaacctccctgcctgattctcctgcctcagcctgccgagtgcctgggattgcaggcgcgcgccgccacgcctgactggttttcgtattttttggtggagacggggtttccccgtgttggccgggctggtctccagctcctgaccgcgagtgatctgccagcctcggcctcccgaggtgccgggactgcagacagagtgtcgctcattcagtgctcaatgttgcccaggctggagcgcagtggcgtgatctcggctcgctacaacctccacctcccagccgcctgccttggcttcccaaagtgccgagattgcagcctctgcccggccgccaccccatctaggaagtgaggagcgtctctgcctggccacccatcgtctgggatgtgaggagaccctctgcccggctgcccagtctgggaagtgtggagcgcctcttcccggccgtcatcccgtctaggaagtgaggagcgtctctgcccggccgcccatcatctgggatgtggggagcgcctctgccccgccgccccgtctgagatgtgaagagtgcctctgcccggccgcgaccccgtctgggaactgaggagtgtctctgccccgccgccaccccgtctgggaggtgaggagcgtctctgaccggctgccccgtctgagaagtgaggagcccctccgcccggcagccaccccgtctgggaagtgaggagcccctctgcccagccgccaccccgtctgggaggtatacccaacagctcattgagaacgggccacgatgacgatggcagtttggtcgaacagaaaagggggaaatgtggggaaaagaaagagagatcagattgttgctgtgtctgtgtagaaagaagtagacataggagactccattttgttctgtactaagaaaaattcttctgccttgggatgttgttaatctataaccttacccccaaccccgtgctctctgaaacatgtgctgtgtccactaagggttaaatggattaagggtggtgcaagatgtgctttgttaaacagatgcttgaaggcagcatgcttgttaagagtcatcaccactccctaatctcaagtacccagggacacaaacactgcggaaggcagcagggcccactgcctaggaaaaccagagacctttgttcacatgtttatctgctgaccttccctccactattgtcctatgaccttgccaaatccccctctccgagaaacacccaagaatgatcaataaatactaaaaaaattaaaaaaaaaaaaattcgaaaaaaaaattcagctaatccatgcttgccatttcagttcataaagttcacctcttacccacttacagaggatatatcacatcacaattatgacccaacaccagaagagttgaaaaaatgagaaaaaaatttcatattcttttttacctgaatcctttaaaaaaatttcatattcttataggtaataacagtccttattctgaaaccgcatgttataactaaaagggcacagtgcagactcaagcaatctttatcacttaatgtcatttttacagttatcaacgtcatcctcagaaggaatctttgagggctgggcacagtggctcatgcctgtaatcccagcactttgggaggctgaggagggtggatcctgaggtcacaagattgagaccatcctggctaacatggtgaaacaccgttggaacagaaattaaaagaaattaaagaatgtgtaagcaaaaactcagttgtatgtaagaaaacccaattccccctgaggaagagaaagagctggagtcctttaaaattaactgcctgtttttccctctgtggctagtgagccttatctctccacttcccaggcattgtgaagaccctgtttctctagctgtgcagctgcaaggtcactagacagataatctcaagtcgtaaaacatgttgttccttaaaaagtaagaaatgatgtaatgcatgtcttaactgaataactgtctttgtttcttgcttctgtaatacgcttccccctgcacagatctacccccaccccacgaaatgcttaaaaggtagcttgactttttgttcaaggctcagtcctttggatgttaatctgactgggttgatgcacctaaacaattaaataattcctcctcaacccctccggtctctctgattccttaattatcccgctgcagtgtctctactaaaaatgcaaaaaattagccaggcatggtggcacgtgctgtagtcctagctacttgggaggctgaggcaggggaatagtttgaacccaggaggcggaggttgcagtgagccgagatcatgccactgcactccagcctgggcaacagagtgagactccgtctcaaaaaaaaaaaaaaaaaaaaaagaaggaatctttgagaaacaactcacttcacagtagctcttggaaaacacagtctttgtcttagaaacatagatgttcctttttcaagtggtaccgctaagtaagtacatatggttttgctctaagagggagtactgtcaatcttgctaactgaatttcacattatgcaaacagtggattccagcttgttaaaccattaatcacaaactttgtttcaatagggaaggaagagaatcagtataaaaggggaaacaggctgggtgcagtggctcatgcctgtaatcctaatacttcgtgaggctaaggggagagaattgcttgaggccagaagtacaaaaccagcctggtcaacaaagtgagtccccatctctacaaaagaaaacaacatgcgtgtagtcccagctactcaggagctgaggaagaggatcaatcgtttaggcccaggagtttgggactgccattatcatcccaccgtattccagcctaggcaacagagtgagagcctgtcagaggggggaggggaggggaagggagggggactagaataaaatagaggaaccaagaacatttgcttaaattattggtaacttggctgtaagcactgcaaatacatggaaataatatggtcctaacaacacaattgtttttgtaggttaatatatgtttgatgaaatgacataatatgtaacttaaaatctaaacaaaccaaatgttgtatatttattaaactgcacttttaaaaatagctaatacacagaaactcaaaagacacacacaaatttaaaagacaaagaaaggctgagcaacaaaataagcagtgagggtaacaatataattcagactaaaacaaatatccatgagtctatactacactaactataaatagaacagatgggaaagctctaccttacagcagaattacaattaatgaaagtagaaggttgggggcggtggctcacacctataatcccagcagtctgggaggccaaggtgggtaaattacgaggtgaggagtttgagacaagcctggccaacatggtgaaaccccatctctactaaaaatacaaaaattagcccagtgtggtggcgcacgcctgtaatcccagctactcaggaggccgaggcaggagaatcacttgaacctgggaggcagaggttgcagtgagccgagattgcaccattgcactccagcctgggcgacagtgtgagacaccatctcaaaaaaaaaaaagaaaagaaaaagaaagtagaaagaattgagcagacagaaaccaccatagtagcaaactccacaatgctaaccttcatataacatcatggatgttaaaaataataaacgacctctccctctccctcctctccctcctctccctctccctctccccacggtcttcctctccctctctttccaccgtctccctctgatgctgagccgaagctggactgtactgctgccatctcggctcactgcaacctccctgcctgattctcctgcctcagcctgccgagtgcctgggattgcaggcgcgcgccgccacgcctgactggttttcgtatttttctggtggagacggggtttcgctgtgttggccgggctggtctccagctcctaaccacgagtgatccgccagcctcggcctcccaaggtgccgggattgcagacggagtctcgttcactcagtgctcaatggtgcccaggctggagtgcagtggtgtgatctcggctcgctacaacctccacctcccagccgcctgccttggcttcccaaagtgccgagattgcagcctctgcccggccgccaccccatctgggaagtgaggagcgtctctgcctggcagcccatcgtctgggatgtgaggagcccctctgcctggctgcccagtctggaaagtgaggagcgtctctgcccggccgcccatcgtctgagatgtggggagcgcctctgccccgccgccccgtctgggatgtgaggagcgcctctgcccggccgcgaccccgtctgggaggtgaggagcgtctctgcccggccgccccgtctgagaaatgaggagaccctctgcctggcaaccgccccgtctgagaagtgaggagcccctccgcccggcagttgccccgtctgagaagggaggagcgtctccgacgggcagccaccccatccgggagggaggtgggggtcagcccccgccaggccagctgccccgtccaggagggaggtggggggtcagcccccgccaggccagccgccccgtccaggagggaggagggggtcaggccccgcccggccagccaccctatccgggagggaggtgggggggtcagccccccgcccggccagctgccccgtccgggaggtgaggggcgcctctgcccggccgcccctactgggaagtgaggagcccctctgcccggccaccaccccgtctgggagctgtacccaacagctcattgagaacgggccatgatgacaatggcgcttttgtggaatagaaaggggggaaaggtggggaaaagattgagaaatcggatggttgccgtgtctgtgtagaaggaagtagacatgggagacttttcattttgttctgtactaagaaaagttcttctgccttgggatcctgttgatctgtgaccttacccccaaccctgtgctctctgaaacatgtgctgtgtccactcagggttaaatggattaagggtggtgcaagatgtttttgttaaacagatgcttgaaggcagcatgctcattaagagtcatcaccactccctaatctcaagtacccagggacacaaacactgcggaaggccgcagggtcctctgcctaggaaaaccagagacctttgttcacttgtttatctgctgaccttccctccactattgtcctatgaccctgccaaatccccctctgcgagaaacaccagaatgatcaataaaaaataataataataataataaacgaaaaaagtcacaatgtataatgtagtctcaatgtagttctagccaaaataaatttattaactacaaagaacataattctgcagtggataagctaaaagacactaccttaactaagtgaccaaaattaatatcaccagtaacaagcattaattgacatcatgtacctcttgttgatacatggacaaggatacaccaccatttctacagtatacttgtcaaactgcataacttgaatttaattatgagaaaacaagagtaaacatcagacaaagccaaatcgaggatattctattttaaaactgaccaatattctttaaaattatcaaccctgggtaaaacagctcatgcctgtaattccagtactttgggaggctgaggtggacagatcattcaaggtcaggagtttgagcccagcctggccaacatcgtgaatccctgtctctaccaaaaaatacaaaaactagccaagtgtggtggtgcacacctgtagccccagccactcaggaggacgaggcaggagaatcgcttgaacctgggaggcggaggttacagtgagccgagatcatgccactgcactccaacctgggagacagtgagaccctgtctcaaaaaaaaaaaaaaaaaaaaagaccagcctaggcaacacagtgagaccccatctgccccatctgtataaaaaaaataagaaaattagccaggccatagtttaagagtagcctgggtaacatagcaataccccatctctatgaaaatttaaaaattaggcaggtgtggtggcatgtacctgagtcccagctacttaagaggctgagatggaaggatcacttcaggctgagaggtcaaagctgcagtgagctgtgtttgcaccactgcagtccagcttgagtgacagcaggagacttttctgtattcagcaggaaatcctgctgtatttcctgcttccctgttgaagctgtggataaaatcctgttcttagaagagcaaggaggcataacaattcaatgtaacgtgcaatcctggactgaatcctgggccaaaaaaagaatactaccgtacagttgaagaatttgaataaggtttgtagattagttcacagaactttttttttttttgagtcttgctctgtcaccaggctggagtgcagtggcacgtgatctcagctcactgcaacctccacctgcagggttcgattcccctgtctcagcctcccgagtagctgggactacaggcgcgcaccaccacacctggctaattttttttttgtattttagtagagacagggtttcatcatgttggccaggatggtcttgatctcctgacctcgtgatccgcccgtctcagcctcccaaagtgctgggattacaggcatgagccaccgtaactggattttttttttttgaaatgcagtctcgctttgtcgcccaggctgaagcgcaatggcgctcactgcaacctctgcctcccaaggttcaagtgattctcctgcttcagcttcccaagtagctgggatgcccgctgccaccatgcccagctaattcctggggtttttgtttgtttgagatggagtctcgctctgttgtgaggctggagcgcggtggcgcgatcttggctcactgcaacctctgcctcccgggttcaagcgattctcctgcctcagcctcccgagtggctgggattacaggcatgtgccaccatgccaggctaatttttgtatttttagtagagatggggtttcaccatgttggccaggctggtctcaatctcccgaccttgggatccgcccacctcggcctcccaaagtgctaggatcacaggcgtgagccaccgcgcccgactaatttctgtatttttagtagagacgaggtttcaccatgttggccaggctggtctccaactcctgacctcaagtgatccgcctgccttggcctcccaaagtgctaggattataggtgtgagccactgtgcccatccaacagtcctgtttcaatgttaatttcctgattttgataactgatattattgagatgtaagatgttaatattaattgagaaagctggagtataaattctctatcctatttttagaactttttgtttaagtatgacactatttcaaaatgaaaacttaaaaataagaacatctaaaaaaaaaagatacataaaagcctaataaaaagtcagtttttctcatcttcctactacccagttatccttcccagaggcatctactgttccagtcataaaaaccacatatttgaaagtaattttgaaccattacttaaaacttttaaagatatattaaactcaatgaattttttaaaattacaaatgccccaaagtgaatttattaaaatttgtgctgaccaattgttttctatctagtataatgtcaaagatgcctctatgctatttggctttaattgtttaaacaaagttttgctttttttttttttttgtaacatggcaaggtttcatcatggggtttaaacaaaatttcaaaatttcaagcaactactttacatacataaaccaatgttttgtatagttaaatacattcataagtattaagtgttttgtggtgtcaaatctgtttccttcctttccaggatactaatttcatttggcctccaatttaggaaggacttgtttccaacattaagttcagaattggttgtttggaattcaagttcattttcccatagaaatcatgtaataaatgatagttagattccctgattagcttagaaaggaaccaatttaacctataatgtatataagagttattccaatataacacatataaatccaaatcaagctctcaatgataaaaatgttgctatagataaaatacctccagtgtcccaacttgagaaaacagtcacatatcttctttcagatgagaggcagaggtcatgctggaaaatcattacataactctacactgtagtcaatgttgaagactgaagagtacaggccgaattaaggagagagggttcatatgtgactgtgtatatatatggtacctacaggactgtttacatatgttcatatactccttctcccatatacttcctcactccatcactattaggcttggacatgtgactcgcttcaggcaatggaatctaagtagaaatgtaagctgtatcaaagatcacttaggtgaactggcttggtatcttgtgcacctgccctcagccttggagaaaaaaaccactgagatttacgacttgtttgtgatagccaagtctggttgatttagaagtttctcctcatcgaacttcacttgtaatgtcatctgtatggtaactacacaccttatagctcatcaacatgtagtagagtgaggtcagaaatgatgacaaaagcaagaaagagcacaagtaggcaatgctgcagtctaaagaatttcaggaaatgttatctcttggatggatttactgaacagccttcctattgctccccactcctatcccgcaatttggtctttgcatggtagtcagactaattatttaaaaacagaaaccagtttatatatttatgttatacccctgtctgatcatgaggggttttgtaggccatggtatggaattttgagtttcatggtgaaaacaaagaactctagaagtaataaaaaataaaaatgtagaccataacacagtagggccagttaccagagtcaagtaattttcctaaatcttagtaaacctcaagtgagctactgtaggccgggtacagtggctcaagtctgtaatcccagcaccctgagaggctgatgtgggaggactgcttgagctcagcagttcaagactattctgggcaacacagtgagaccacctctctctacataaaattgaaaaaaaaaaaaaaaattggggctgggcaccgtggctcacgcctgtaatcccagcactttgggaggccaaagtaggcagatcacgaggtcaggagatcaagaccatcctggctaacacagtgaaatcccgtctctactaaaaaatacaaaaaaattagccaggcatggtggcgggcgcctgtagtcccagcgactcgggaggctgaggcaggagaatggcgtgaacccaggaggcagagcttgcagtgagctgagattgcgccactgcactccagcctgggcgacagagagagaccccgtctcaaaaaaacaaaaaaaattagccagacatggtgacatgtgcctgtagtcccagctactcaggaggctgaggtgggaggactgcttgagcctgggaggttgaggctgcagtaagccgtgattgcgccactgcactccagcctggatgacagagcaagaccctgtctcaaaaccaaacaaacaaaaaacctacgttactgtatatacaagaataaagaaaagggaaaatatgtacataaaatcatatcataagtacaagttggaatggaaaaaattggtactaaattttgaaatatcttgattgacatctaaaaaatgcagagtaagattgttcaaagcaatcaaatttaaaaattcagatacagatactatacatatatgaaaattagcaaaaagttaaaaaattttaaacaggcaaatatgacatacacataaaaaaacccataaaattagcattcagacttaccgtaacaggagttctttgggaagttttttattgattacagcttcatcactatttgagaacatctgcaaaaacaaaatcatagtgtcaagtgttacttaacattttattacagaatgttcaactcaatagtttagaggcaattctctcaggaaagaggtaaaaaaatatagtcggcatcataaaccaaagtcataattttggaaactctttaagatgaaaaagatcttcgaggcatttaattcattccctgtctccaaagaaaaacaagagcagtcagaaggatacattacgtgccagatactgtttcagatgttttcacatattaatggttttaatcttcataccatccctattatcttcactttatagataggaagcttggttaccaaaggtctactgctcagagtccgggcgcagcaactcacacttgtaattccagcactttcagaggctgaggcaagcggatcgcttgagctcaggagttcaagaccagcccaggcaacgtggcgaaaactcttttttttttttttttttgagacagagtcttgctctgctgcccagtctggagtacagtggcatgatctcagctcactgcaacctccacttcccaggttcaagcgattctcctgcttcagtctcctgggtagctgaggttacaggtgcatgccaccatgcccggctaatttttgtttgtttgtttttgagacagagtctcactctgtcgcccaggctggagtgcagtggtgcgatctcggctcaccacaacttctgccacctaggttcaagcaattctcctgcttcagcctcccaagtagctgggattacaggtccctgccacggtgcccagctaatttttgtatttttagtagaggtggagtttcaccaacttggtcaggctggtcttgaactcctgacctcgtgatccacccgccttggcctcccaaagtgctgggattgcaggcatgagccaccatacctggccaacatggcggaactctgtcgctaccaaaaaacacaaaaaatgaaccaggcgtggtggtgtgcgtctgtggtcctagctacgtgggaggctgaggtgggaggactgcctcagtcagggaagtggaggttgcagtgagctgagatcacaccactgcactccagcctcagcgagacagtgagaacccctctccaaaaaaaaaaaaaaaggtttactgctcagctcacatcactatggagtgactattttaatatgccattaagagaagatgactccccaaacttggctcacatttacttgctcaaggagatgttcggaaatctggaatagaaaatattcacttttggccaggcacagtggctcacacttgtaatcccagcactttggcaggctgaggtgggtggatcacctgaggtgaggagttcgagaccagcctggccaacatggcgaaaccccatctctactaaaaatacaaaaaaaagtacgcaggtgtggtggcacacacctgtagtaccagctactcagaagactgaggcatgagaatcacttgaaccccaggctgcagagcttgcagtgagccaagatggcgcccctacaccccagcctgggtgacacagcaatactctatctcaataaaaataaaaattaaaaaaggaaaatattctctttcatgtttatatattgtgcagaaaaccaacagtgcttcataactgccaccatagtggcatcaagtgcatcacttgatgcactcaagtgatcatttaacaaattaatcaaattactcacaacggatacttttaacgagagccaccatttttgccacaaaggagatcatgactgtaagcttatctagcaagctatgtaaaaaaccaaataccatacacaatcaaaagcccagtaaaaatggcacatacacatgtgaccgaagctgagagaaatacgttccgtcgctgctattaagtattgcagaaattcctcttaaggtcatgcaataaacattactgaatacccaatcaggcacttttctagacaatgggataaaaaaagacacgatctctatccttaaggagctcttgcactacaatgaagaaaacagaagaaagcaaataatgtactaattactagagacagatgacaagagatgtaagagagaacaaagaatggcacaactaattctacccggagttgtatctaaattgagcttaaaagaaggccaaaaattagctgggaaaaaaagataacaatatgtacaaaataatggagtcatacatgaagatcctggtatctcatggagattcaaagtagaggtaatgaagagaaagcagaaatggtagggaagtcacagataaaatgcactgcccctcaatttcatttaaagaataattttaataattttttttttgagagagttttgctctattgcccaagctggagtgcaatagcacaatctcagatcactgcaacctccacctcccgggttcaagcgattctcctgcctcagcctcctgagtagctgggattatgggcgcctgccaccacacttgcctgatttttatatttttagtagagacagggtttcaccatgttggccaggctggtctcaaactcctgagctcaacggatcctcccaactcagtgtcccaaagtgctaagattacaggtgtgagctaccacacctggcctaaatattttctgattacaataacctacgttccagataaatggaaagccctgtgagggcagggagcatgcctgttatgtttggcataattttagggttgtgcacagagcctgctacatggcaggaaatcaataaatctacctctgggcaacatggtgaaatcctgtctctacaaaaaacacaaaaattaaccaggcattggctgggagtggtagctcatgcctgtaagcccagcactttgggaggccaaggtgggaggatggcttgagctcaggagttcaagaccagcctgggcaatatagtgagatctcatcttgaaaaaagatgtaaaaagatttataaataataaatcagatgtgatggtgtacacctgtagtcccagctatttggtgggggggtgctggggtgggaggatcacttgtgcccaggaagtcaaggatgcagtggagcatgttcacaccactgcactccagactgggcgacagagtgagatcctgtctcaaaaaaaaaagataatcatcataatgaatggtttattaaatggatggtggggctacaccatgaaggaaacctgtatacagtttagaaatgcgaaacaccaccacagggaagagaatcctaaagacaccgaactctggactagtaggaaggaaataaagttaggaatccattaaaattatggtccaagtaaaagatgacgcagttgtctgtaagattaacagggacagtgaaatgaaaagaaactggaacaaagattgttaaaaaagcaacaatacttagtaacaaaaagttgaatcatttagcaggtttcagtgcaacaaacagactactagaaatgctaatgactgacaattacttttttttttattatactttaagttctagggtacatgtgcacaacatgcaggtttattacatatgtatacatgtgccatgttggtgtgctgcacccgttaactcgtcatttacattaggtatatctcctaatgctatctctcccccctccccccaccccacaacaggtcccggtgtgtgatgttccccaccctgtgtccaagtgttctcattgttcaattcccatctatgagtgagaacatgtggtgtttggttttctgtccttgcaagtttgctcggaatgatggtttccagcttcatccatgtccctacaaaggacatgaactcatccttttttatggctgcatagtattccatggtgtgtatgtgccacattttcttaatccagtctgtcattgatggacgtttgggttggttccaagtccttgctattgtgaatagtgctgcaataaacatacatgtgcatgtgtctttatagcagcatgatttataatcctttgggtatatacccagtaatgggatcgctgggtcaaatggttatttctagttgtagatccttgaggaatcgccacactgtcttccacaatggttgaactagtttacagtcccaccaacagtgtaaaagtgtttctatttctccacactctccagcacctgttgtttcccgactttttaatgatcgccattctaactggtgtgagatggtatctcattatggttttgatttgcatttctctgatggccagtgatgatgagcattttttcatgtgtctgttggctgcataaatgtcttcttttgagaagtgtctgttcatatcctttgcccactttttgatggggttgtttgattttttcttgtaaatttgtttaagttctttgtagattctggatattagtcctttgtcagatgggaagattgtaaaaattttctcccattctgtaggttgcctgtttactctgatggcagtttcttttgctgtgcagaagctctttagtttaattagatgccattggtcaattttggcttttgttgccattgcttttggtgttttagtcatggagtccttgcccacccctatgttctgaatggtattgcttaggttttcttctagagttttttatggttttaggtctaacatttaagtctttaatccatcttgaattaatttttgtataaggtgtaaggaagggatccagtttcagctttctacatatggcaagccagttttccaagccccatctattaaatagggaatcctttctccatttcttgattttgtcaggtttgacaattacattttttagaagaaaaaaaaaatccaatccctcctcagaaggcagtctttcaaaactaaaccattacatttctctctaaacaaggttgggttcgtctttttttttttttggtagagagagagtctcgcagggcacatgttctcaggatctcctgagggctgtgtcacacacatacaaaagatgatgtctcggctgagcgcggtggctcacgcctgtaatcccagcactttgggagtccaaggtgggtggatcacgaggtcaagagatggagaccatcctggccaacatggtgaaacccagtctctactaaaaatacaaaaattagctgggcatggtgacgcacacctgtagttccagctacttgggaggctgaggcaggagaatcccttgaacctgggagcggaggttgcagtgagccgagatcatgctactgcagtccagcctggcgacagaacgagactccgtctcaaaaaaaagaaaaaaaaaagatggagtctcagtatgttgaccaggctggtctgaaactcctggcctcaagcaatcttcctgcctcagccttccaaagtgttgggattacatttgtgagccactgtgcccagtcaggttcttctaatgttcttaaataacatggtttcaaagatactatgtcactatggtcatcattctccagatgcactcataggcagtaattcacaaagttgtaatgtgtttacatgttcttacttttgagacaaggtctcactctgttgcccaggttggagtacagtggtcctatcatagaccactgcagccttgacctccggactcaatgctcccccttcggcctcctgagtagctaggactacagaaacgtgttaccacacctgactaatttttgtatctattgtagagatggggtctcactatgttgcccaatctagtcttgaatgcctgagctcaacagatcctcctgcctcagcctctcaaattgctgggattaggccgggcacagcagttcatgcctgtaatcccagcactttgggaggctgaggcgggcagatcacttgaggtcatgagtttgaaaccatcctggccaacatgatgaaaccccgtctctactaaaaatacacaaattagccaggcatggtggcaggcacctgtaatcccagctacttgggaggctgaagcaggagaatcacttgaacccgggagacagaggttgcagtgagctgagatcatgccactgcactccagcctggggaacagagcgggactccgtctcaaaataaataagcaaataaataaaaatcgagccaccatactccagcctgggcaacagagcaagattccatctcaaaaaaaaaaaaaaaaaaaaaaaaaaaaggctgggattacaggtattaagtcaccatgcctggtcagaattttccatagtggtgtcatgtcagcactcaaaatctttcagattttgggctgagcaaggtgactcatgcctataatcccggcaccttggaaggttgaggcaggaggatagcttgagcccaagaggtcaaggatgcagcaagcagtgtttacaccactgtactccagcctggtaaaacagtgagaccccacctctggaaaaaaaaaataagaaaattccacacctgacctcttgtgataagtcacagtcaagatgcagtcaaggccaggcgtagtggctcacgcctgtaatcccagcactttgggaggctgaggcaggcagatcacgaggtcaggagatcgagaccatcctagctaacacggtgaaaccccatctctactaaaaatacaaaaaattagccgggcatggtggctagcgcttgtagtcccagctactcaggaggctgaggcaggagaatggcatgaacccgggaggcggagcttgcagtgagcagagatcgcgccactgcactccagcctgggctaaagagcgagactccgtctcaaaaaaaaaaaaaaaagatgcagtcaaaactttgtttcatgcccaaaaaattatttaaaatattctatcaaacactcaatctactagaactatgtccaacccaaatccacaaaaagtaaaacttaatcattttaattttagaaaacaaagtattaaatgccacatctcacctaataaggcactatgttcacttcaatatacataataatggaaaataacaaaaaaacacattatatgttgttcacatgacttctacaatttcacatataaaaacaaagaagcaccaggcacagtagctcatgcctgtaactttgggaggccaaggcgggctgatcacctgaggctgggagatcgagaccagctgaccaacatggagaaaccccatctctactaaaaatacaaaattagccaggcatggtgttgcatgcctataatcccagctacctgggaggcagaggcagaagaatcgcttgaacctggaaggcagaggttgcagtgagctgagattgtgccatggcactccagcctgggcaacagagctagactccttctcgaaaacaaaaacaaaaacaaaaaaagaagcaaaaaaaaaaaaaaaaacatagctaatttcctcccttgctttggtctatataaactgagaatgctgctgcctctgtaggagcattaaagtgaagggaaaaagaaacagcaccctggaaccatttgggaaatgccattatgtgtaagacatctgtccagatttatatttccctcccctttcttctgcacataagtctcctaactccaggtttgtaagaaagaaccagattagtggttaagaacggatggtcccctgagcaggagtatcagcatcaacccggaacttacaagaattgaaaattcataggattttccctagacctgtagaatcaaagactgggggtaggtgggcaggagagaaaatggtggggcaatctctattttaacaagacctctatgtgatactgatgtaccctaaagtttaagaaccaataggtcagatgaagtagattcaggatctcaggaaaaaataacacataaccagaatattatcacttgaagtgacacagcaatagacattagaaaataatcctaaagccaagcatagtggctcacgcctgtaatcccagcactttgggaggctgaggtgggcggatcacatgaggtcaggagttcgagatcagcctggctaacatggtgaaaccccatctctactaaaaatacaaaaaattagcagggcatggtggtgtgcacctgtaatcccagctactcgggaggctgaggcaggagaattgctcgaaaccgggagggggaggttgcagtgagctgagatcacaccattgcactccagcttgggcaacaagagagaaactctgtctcaccaaaaaaaaaaaaaaaaagaatcctaaaagtagacacaataacactagatgttttctaggaaacccaaatggttcctgctcctgttcatgctattgtttataaaacaactatttcataaaagcaatagaatatgtgttttaggtattttactattttatatttcagttgaatccaaactccaggtttctcattcaaaaatataaaaggagtcaaaacaatttagatcaaggctataacaaattacaacaatcttgtgaaggattttcaatataacagttgtagaggaaataactattcaaatgtttaacattcttaggtaattctctggttttatattaacacaggaagtatcatgatatatttctgtcatctataaacaattacaaggaagtaatcagcagaaaaacatgggagcaactagattcttctcttcttattgtttcaaaggacaatatcacctaaacatgcaagcagacactgtgatagccatgacttctaggggtagaatgttcttaaatatattggtttttaaaaagctaagcaacttggtttatatacaataatatactgttggtttgtataaaattataattgtttttctataacgtacatagctgaggaaacaactttgaaggcccttgtaccaatgtagaattatatcatctaatagagtttgtgaatattaagcagcttgtgtgtgtgtgcacgcgcgtgcacgctattacttttgccttttctatcagtttctaaatctcagtttgacacatttgagggatctgtttactaacataatacatttatttaaatgcttagtaaataaacaggacccaagaaaccacttcaggaggctctaaaaccagaggttgggtggaaaagggccgaaaggttgaacaaagaaactaggaaagagccaggcacagtggtgtgtgccggtagttccagctacttggtaggctgaaggggagtatcgcttgatcccaggagttcaagtctggcctgggcaagatcgcgagaccccatgtctgaaaaaataaatacattaaaaaaaataggaaagaaatggccatgcacagtggctcacaactgtaatcccagcactttcggaggctgaggcaggcagatcacttgagctcaggagttgaccagactggccaacatggtgaaaccccatctctactaaaaaatacaaaaatcagccgggtgtggtagcgtgcacctgtagtcccaactacttgggaggctgaggcatgagaattgcttaaaccctggaggcggaggttgcagtgagccgagatcaggctactgcactccagccttggcaacagagtgaagctctgtctgggaaaaaaaaaaaaaaagaaaagaagaaaaaaaaggaaagaaatacttgttcaacagtgacccctattgcttaaattaaatctactaagtactaaacaggaaattaaaagctctgacctatattatttaagctttatagattatatacagaattcccaattcttagctagcacctggctgtgtggaaagaagactatttctcttgcagctaggcaggattcagtaactaagttttgaccagtaggttgtaagaaaaagtgccatgtacactttcaggagagtacttaaagagagaggttatgtcctttttctttacccctttctcaattctgctgcttagaataggattaggatgcctggaactccatcttgtatcatgaagctgaaggccaccgttttaaagacaagcagaaaactagaaaaggtctgcagatgattgcagggataccatgccaataaaaactgtctacatctggactttatgagagaaaataaacataaatatttaagccacttttaatttgggtctctgacatatgcagctaaacttagtaatacataggcagctaaacctactaaaacatatgcagctaaacttactaaaacttactaaacttactaagtacctccttatcagtggttttcctttctacggtccatggtcagccacagtctgaaaacaggttagtaaaagagacattcacacaactttattccagtatactgttataattgttctattttattagttatttttgttaatctctttctgtgcctaatttataaatcataccttatcataggtatataagtatagaaaaaatcatagtatatatagggttctatactatatgcaattttaggcttccaccaggggtcttggaacatattccccatggataagggagaccactacaccttatttatttatttatttatttatttatttatttatttatttgagacagagtctcactctgttgccaggctggagtgcagtggcacaatcttggctcactgcaacctccacctcccaggttcaagcgattctcctgcctcagcctcccaagtagctgggattacagacacgcgccaccacacccagctaatttttgtatttttagtagagatggggtttcatcatattggccaggatggtctcgacctcttgaccttgtcatgatccgcccgccttggcctcccaaagtgctggggttacaagagtgagccaccgcacccagcctatttttatcttaaaaatgtttcgtttttcaagatgaagagttctgaagattgcttgtacaacactgtgaatgtacttaacactactgaactgtgtaatgtacatttaaaaacagttaagatggtaaatattatgttacatgtattttaccacagaaattttaaaggtacaagtattttcacattctggcatctgtgaaatcaggattcatctcacaattaaaaaccaaaagcatctgtgtataaaataaagttgcagtttataattcatggcatcttttgtttaatgatatatagtgaagtctaccaacggggaaaacaaataagatagtatccctgaggaccatttgcttctcctcaaacaagctcttgcttttttgttcatgctattttctttagagtacctgtgcaatgaaatctgcctactctgtcaatacaaagagattaatgttcatcgcacttactacccattccatgtccttctcaatctcgttaactggatgtgactgttccttctcctatgaaacctcaaagcatcccaaagctcagaataccagtcctacgttggtgttaccagactataagctctgagaggaaagggaccatgtctgttttgtcaccacagtatagtcagcaacccacagctaaactagtgcctaggaatcactgaatcaatgaatgttatttatacgttaggaatctggaagtactctaatccctcccctctttttgactgtaaattcccagcagccttttgtggctttttcactacgtatctctatagcagactgtcttgcaaaaaatgcaataaaaatatttaataaattgaatgtcacccatttagcaaataagatatgaatgatatcagcacagcaatagacagactgaattatactacaacaaataaaataacaattaaaatagttgaaaaaacaaaagtttggaaatccaggttacagcccacttatttcaagggatgttcaccacataaaatttcttggtttttttgtttgtttgtttgtttttgagacagagttttgctcttgttgtccaggctagagtgcaatggcacaatctcagctcactagaacctctgcctccctggttcaagtgattctcctgcctcagcctcccaagtagctgggattataggcatgcgccaccatgcccagctaattttttatttttagtagaggcggcatttcaccatgttggtcaggctggtctcttaactcctgacctcaagtgatccacctgcctcagcctcccaaagtgctgggattacaggtgtgagccaccacgcccggcctaaaatttcttgattaaaaacactatggccacgcctgtaatcccagcactttgggaggctgaggtgggtggactgtttgagcccctaaggttgagaacagcctcccaaagtgctgggattgcaggcatgagccacgacacctggccttcttcatatattttaaatagccctttatataaatgatttgattatttgatttgcaaatactttctcccatgtcacccagactgtgttttctacttcttaatggtgtcttctgacacactactgtttttaattttgataaactgcaatttttttcttgatgtatcatgcttttgatgtcttatacaagaactcctgggccgggcgcggtggctcacgcctgtaatcccagcactttgggaggccaaggcgggcggatcacctgaggtcaggagttcaagaccagcctggccacatggtgaaaccccgtctctactaaaaatacaaaaattagctgcgcgtggtggcaggtgcctgtaattccagctacttgggaggctgaggcaggagaatcgattgaacccaggaggcagaggttgcagtgagctgagattgtgccattgcactccagcctgagggacaaaatcgagacttcgtctcaaaaaaaaaaaaaaaaaaaaagaactcctttgcctaatccaatttcataaaaattttctcctatgttttaaaagttttgggcaggaggggtggctcacacctgtaatcccagcactttgggaagccaaggtgggtggatcatgaggtcaggagttcgagaccagcctggccaacatggtgaaaccctgtctctactaaaaatacaaaaagtagccaggcgtggtggcatccacctgtaatcccctgctacttgggaggctgaggcagaagaatcacctgaacccaggaggcagaggttgcagtgagctgagattgtgccacggcactccagcctaggcgacagagcgagactccatctcaaaaaaaaaaaaaaaaaaaaaagttttatagttttagcttatacacttaagtctaagatccattttgagttaattatcatatgtggtatgaggtgagagcacaacttcatctgtctgcatgcagatatacaattgtttcaccaccatctgttttgttttgagacagggtttcactctgtcactgaggctggagtacagtggcacaatcatggctcactgcagcctcaacttcttgggctcaagtgatcatcccatctcagccccccaagtggctgggactacaggtacatatcaccacgctcagctattttttctatattttatagagacgggatttcgccatgttgcctaggatagtcttgaactcctggactcaagcaatctgtctgccttggcctcccaggcggctaggattataggcatgagcccctgcgctcggcctacatttgtgtttgttttgagacagggtatcactctgtcacccagggtggagtgcagtggtgcaatcacctctcactgcagccttgacctcccaggctcaagcaattctaccacctctgcctcctgagaagctggaactacgggtgcgtgccaccacacctggctaatttttttttttttaattttgcagtagagacaaggtctcactatgttgcccaggctagtcttaaactcctaaactcaagagctcctcccactttgacctcccaaagtgctgggattacaggcatgagctatcgtacccagccccatttgaaatagtctttaaagcaaatggggctgggtccaatggctcatgcctgtaatcccagcactttgggaggccaaggcgggtggatcaccgaggttgggagttcgagaccagcctgaccaacatggagaaacctcgtctctactaaaaatacaaaattagccgggcgtggtgctgcatgtctgtaatcccagctacttgggaggctgaggcaggagaatcacttgaacccgggaggaggaggttgaagtgagccaagttcgtgccacactgcactccagcctaggcaacaagagcaaaactctgtctcaaaaaaaaaaaaaaaaaagactttttttgcccagttgaattgctttagtaccttaatcaaatatcacttgaccataaatgttggcattatttctagactctcaatactgttccattaatctatacatatatctttatgtcaacaattcactgtcactgttaggcatgcctctcattctgtatgttttctctgtctcatatcttttgttcttctgttccttttatattgccttctggtatcttaaacagttttataattatcatcttacgcgaaaccccctttatttcttgagacagtgtcttactatgtcacccaggctagagtgcggtggcacaaacatagctcactgcaacctccaacttctggggctcaagcgaagctgcctcagcctcccaacgtgttgcgactacaggtgagtcaccatgcccagctggcaaatgcctttaattcagtcaagataataaaagaaacatttacttattgtcgttcatatttacctctgaaattaacttctgctcttctttttcttcaagttaccatctggtaccatagcgtttcatttcagcttgaagtacttcctttagtaaggcaagcctgctaacaaattctctcagtatttgcttatctggaaacgtttttattttgcctcaacttttgaacaaagtattagttcaggttttccagagaaacagaaacaattacatatatataaactcttctcatacatatgcatatgaagagatttattataagaactgtctcacagaaagcttataatgtaatccagtcagagtccaaaggcctaactaagaaccagaagtggaggtgaggcagtattaccagcgtccaaaggccagaacaggagctctgatgtccaaggaaaagagaaaatgaatgtctcagctcaaggagaggcagtattctcccttcctccacctttttgttttattcaggccctcagctgattggatgatgctggcccacactggtgagggcggatctttctttactcagtctactgatttaaatactaacctcttccacaaacaccctcacagacacacccagaaataatgttttactagctattcgggcatcccttagccttctcaagatggcatataaggccaggagcagtggctcatgcctgtaatcctagcgctttgggaggctgaggtgggtggatcacttgaagttaggagtttgagaccagcctggccaacatggcgaaaccctgtctcttctaaaaatacaaagattatccgggcgtggtggcgtacgcctgtaatcccacctactcagaggctaaggcaggagaatcactagaaccctggaagtgggggttgcagtgagctgagatcaaaccactgcactccagcctgggcaacagagtgagactctgtctcaaaaaaaaacaaaaaaacaaaaaaacaaacaaaaaaaacacctctcagtagaaacaataacaacactatcaacagaatgaaaagacaacctacacattaggagaaaatatttgcaaatatctatctcaggagttaacacccagagtatataaagaaatcctacaaactgaaaaacaaacaaaaaacaatccaactaaaaaatgggcaaaaggcttgaatattcagacgtttcaccaaagaaaatatacaagggaccgataagcacatgaaaagatgctaaacatcactaatcattagaaaaatgcaaatcaaaaccacaagataccacttcacaatcattaggaaggctattttctaaaacaaaaaatctggcaaggcgcagtggctcacgcctataatcccaccacaccactttgggaggctgctgaggcgggctgatcgcctgagctcaggagtttgaaaccagcctggccaaccccatatctacaaaaaaaatataaaaaattagcgtggcggcacgcacttgtacctgtagtcccagctacttgggaaactgaggcaggaaaatggcttgagtccaggaggtggaagttgcagtgagccaggattatgcaacttcactccagcctgagcgtgggtgacacagcaagatcctgtctcaaaaacaaacaacagaggtgggcctgcaatcccagcactttgggaggccaaggcgggcagatcatgatgtcaggagttcaagaccagcctggccaacatggtgaaaccctgtctctactaaaaatacaaaaattagccaggcgtggtagcacaccggaggctgaagcaggagaactgcttgaacccgggaggcggaggttgcagtgagccaagatcacgcaactgcactccggcctgggcaacaagagtgagactccatcttggaaaaaaaaaaaacccagaaagtaacaagtgttggtgagaatgtggagaaattggaaaccttaagagacattgctgcattgctcatgggaatggaaaatggtgtggctgctacagaaaacggtatggcagttccctaaaaaattaaacagaattttcatatgatccggcaattcctattcttattcctatttcttcaattcctattttggtacatatctgaaataactgaaagcaggttcacaacagccaaaaggcagaagtcactcaggtgtccaacagatgaatgaataaacaaaatgtgctttttacataaaatggaatatttagtattaaaaagcaattattacatacagaattaaattattcagataaaacattaaagtattaaatgtataaacataaaatattaaaattatgttgttttatgattatataaaatttacataaaaacatatattacatattatttagtattaaaaatgaaaaaattctgacacatggatgaaccctgaagacattatgctaagtggaataaaccagtcacaaaagtaccacttacaaagggtacccacagtagtgaaattcataagagaaaggatagtggtggttggcaggggctaaaaggggagagggaatggggagttactgtttaatggttagagaagtttcagtttgggaagatgaaaaaagttctacatgtggatggtggtgacaggtttcataacaatgtgaatgtacttaatgtcactgaactgtacacttgaaattgctttacgtggtacatcttatgcatattttataataaaaatgatttaaaaacaaatttcacactgttgtcaattttaaattttcaatatttgatgtggttctgtgacagattttactgagtcaatttggttacggtagtaacagtgtttcccagaaatcttttctctacatggtttgggttaggagcgggacaaaaatggaacaagattttggaaagcagagtgaggcatgatgaatacactttgatgactttcatgatcttttcacactcagagacagattcagaaatgtctgtcagaatccactttgtcctctgctctatgtctggctttcttcccgaacgctggccttgctgaccaacagtggcctcaaaccactgttggctaagcatcagagacagtagctattcagataacagcttcccatataccaccccaggaactccttgttcagaggccaattcacatccccaaaacaatgcctagaaatctccttagatataccagttgttaccaatggtcatatttttgccagttagtctacatgtattaatacatgacatgggtcatatttttcccagattctagtagcaatttcccccattgttccagcctccaccaacaggcttcttgacacccgttcagcctttgcctgctacctgatcctaaagtcagtgccacattctaggtttttattattgcattgcatttctgagtataaatttctgtattaagcaaggttcagtcaggacagcaaagtcacctgagtgttagggaacaggagttacaagaattagaccataatgaaaccatgggaagatctagagaggtgaaggtctagaagaaggagttggaggatcagagaagagccatcaatcagagaagccaagcagattgagctgccaagttgatgctgtgaatggagtttgtgaagtctatgggaggccatttcgctgttagctgaatagtttgataaactaactatgataaagtaacatgagagatatgcagaagaaagaactgcacagtttgcaaagaactgagaatattgagagcctagaatttgctggattggaaaataaaacttcctcatcttctgtctctggagcccagaagcttctcaaaacaagaagaaatgtttttggtcaggcagggtggcttatgcctgtaatcccagcactttgggaggctgaggcaggtagatcattaagtcaggagatcgagaccatcctggctaacactgtgaaaccctgtctctactaaaaatacaaaaaattagctgggtgtggtggcacgcgcctgtagtcccagctactcgggaggctgaggcaggagaactgcttgaacctgggaggcggagtttgcagtgagccgagatcgcaccactgcactccagccttagcgacagagcgagactccgtctcaaaaaaaaatgctttcttggccaggcacagtggctcatacctgtaaatcccagcactttacaaggctgaggtatgaggactgcccgagccccggagttcaagaccagcctgggcaagatagcaagaccccatctctaatatttaaaaagagtaaagttttaaaaatgcttttggattttggagcactaaaaaaaaaaaaaaaatgccctggccaggcatggtggctgatacctgtaatcccagcactttgggaggccaaggcgggcagatcacgaggtcaggagatcgagaccatcctggctaacacggtgaaacctcgtctctactaaaaatacacacacaaaaaattagccaggaatggtggcgggcgcctgcagtcccagctactcaggaggctgaggcaggagaatggcgtgaacccgggaggcagagcttgcagtgagccaagactgccccactgcattgcagcctgggcaacagagcgagactccgtctcaaaaaaaaaagaaaaatgctttcttggccaggcacagtggctcatacctgtaatcccagcactttagaaggctgaggtacgaggactgcctaagcccaggagttcgagaccagcctgggtaagatggcaagaccccatctcctgcctcagcctcccgggtagctgggattacaggcatgtgccaccacacccagctaattttctatttttagtagagagaggttttctccatgttggtcaggctggtctcgaactcccgacctcaggtgatccacctgcctcggcctcccaaagtgctgggattacaggcgtgagccaccacacccggctttttttttttttctgagacagagtctcgctctgtcaaccaggctggagtgcagtagtgcgacctcggctcactgcaaccttcatctcgggttcaagtgattctcctgcctcagcctcccaaacagctgggattacaggcatgcgccaccacacccagctagtttttttgtatttttagtagaaatggagttatcaccttgttggccagactggtcatgctcctgacctcaagtgatctgcctgcctcggcctcccaaagtgctgggattacaggtgtgagccactgcgcctggcctagtaaacttttcttaatgaaacacttattacaaccaaccattattaaatgtcctttacatccctttcctacattttatttatttattcatttatttatttgagacagtttcactcttgtcgcccaggctggagtgcaatggcacgcgatctcagctcatcacaacctccgcctcctgggttcaagtgattctcctgcctcaccctcccgagctactagggaggctgggattacaggcatgtgccaccacacccagctaattttttttgtatttttagtagagacagggtttctccatgttggtcaggctggtcttgaactcccaacctcaggtgatccaccagcctgggcctcccaaagtgctgggattatgggtgtgagccaccgcgcttggccaaatttttatttttaaatttgttttagagacagggtctccctatgttgcccaggctggtctcaaaactcctagtctcaagtgatcctcccgcttcagcctcccaaagtgctaagattacaggtgtgagccaccacacctagcctctttttgcattctttacaaatatctgagtgtttataaattaagccacatgtctatacaaacagataaataatgggccaaacaaggtggcttacacctataatcccagtactttgggaggccaaggtaggtgggaggattgccaggaattccagaccagcctgggcaacatgatgaggcccctcctctagaaaaaattttaaaaactagctgggcatggtgacacatgtcaatagtcccagctacttgggaggaagaggtgagaggattgcttaagcccggaagttgaaggctgcaatgagctgtgatctggccactgtactccagcctgggtgacagagcaagactttatctcaaaaaaaaaaaaaaaacaaaaaacaaaaaaaaaaacaataaaaagtaagtaatgaaacccaatgaatcatatctttttttttttttttttttttttgaagacaaagtcccactcggtcgcccaggctggaatgcagtgacgcgatctcagctcgctgcaacttccacctcctgggttcaagcaattttcgtgcctcagcctcccgagtagctgagattacaggtatgtgccaccacgctcgactagtttttgtatttttagtacagacggggtttcaccatgttggccaggctggtctcgaactcctggcctcaagtgatccgcccacctcagtctcccaaagtgctgggattacaagatgtgagccactgcgcctgggtcccaatgaatcatatctttgtggcaatgcccctttgcaatgcaattttgttgcttctcccttcaaaagatggggtttattttcccaccccttgaatctaggttgacatagtgacttgatttgaccaaaagaatgtggtggggctgggtgcagtggctcacgcctgtaatcccaacaatctgggaggccaaggagagtggattgcttgaggccaggattttgagacctgggcaacatggcaataccttctctcaaaaacaacaacaaaaattatctgggcgtggtggtgcacacctgcagtctcatctactcaggaggctgaggcgggaggattgcttgagccagggaaggcagaggttacagtgagccaaggtcgtgccactgcactccagcctgggagacagaacaagaccctgtctcaaaaaagaaaaagaaaaaaagaatgtggcaggaataacactgtgatttcccaggctaggacttaagagacaataaagctttaccctcttgacagactcctgcagccatctaaggaagtccacactaaactcctgaatgatgagagatcatgtggagaacaagaactggctgacagcaacaccaaaaggtctcagagtataagtgaggccatcttagacacgtaagccccactcaagtcaccaaatgactgcagtcttatgagcgacctattggggagatggcaggaccgtcaggctgcataatgaattgttttaagccacaaagttacagggtggttgttaaatagcaaatactacaaaaacaggttctctattgaagaagtttatgactcacgatctaaatttcatagattaagaaatttaaaaaaagaaatttcatagattaagcaaaatttctaacatacaaaggtagcccaatacaggtcaaatcttttggtggtaggaaaatgttaatgagagattaagaatcaattttcattaaaaaaaatccagagttgaagctgcagaagattttttaaatgtgtatttttcctataagtaatttttactgattatgccattccttcattcaaccaacaccagatgttttttccagttggccagttttcttgcccgaatctaaaaggaaaaacatttttgtttggccagataaacctaaaacaaagtaagtttataattcctccgcccaacatcttgtccctagcagaaataaaattgctttttagaagctaactactgccagtgcattgccgtctcatgactaaacttctcctaagaaagaaatcactagataaaaacattacggaaggaatacatttagctaacagacacattacttaataggtcaaactttctgctttggacaccttctaacatctgactcaatattctgagctttcttttatgctgacttctgtttcatttacttaacccaaacctatgtccactaccaattcactgctctcagtccaaaaatagagcatctacacacttttatttttttcttttcagtatttttaatttatttgacattaaccatcctcagcaacagtctaggacctggaggattccatgaactctgaagaactgaatatgactgaatctcatgttgaactggtgctgcttaatcctggaaatgttccatgccctactgaaaacttcttttgaagttatgaagtgaaaggaaagaaactaaaattcaaagtgacaatattatttcatgtccacctctcctcctccttcctccatttcccttagtttcacttcatctgtaacacaggaaagaactaagaggtggatactaaaagacaacaacggaatttaaaaaaatttttttttttttagagatggggtctcgctatgtctgaagtagactggctattcacaggagcgatcatagtacaccctcaagcaatcctccagcctcagtctctaaggtagctgaaattacagtacatgccactgcttctggctgtattcagtgtaattttctcacaatctttgtttaaattaagcgtccgtgtgaatatttagtatttagatactactcagtgtcaggacaagcagacaataggactatggactctttctcaccctacatataggctatcatatttttttctactttctagactcttttccctcaactgctccaaaatctgtcacatctgaatattttccatatgctcaaatgcatcagatactgtttttctctggtgctaaacattcccagaacactttcttttcctacactctaagaaattccctagactggctacacaactgtcatcttgggctctccagtagctcttctcttttattgcattgtttccagtaccccatattgtctcacttgctttttaagggaacatctcacagtaatttatgaaaaaacagctcatgggaactcaggtttttaagtctcttgcatgtctaaaatatgtatttaccttagactcacatctgattgataatttggcttgcaataaaattataagatgaaaatcctttccactgaagatatctgaagacactgcttgatgcatttctgacctcgtaagtttctgctgtgatatataatgccattctaatttggggtcctttgaatgtaacctctagttacttttggaagcttttagtatattctctttatcctcagtttaccaaaatttcatcatcaagcctcttggtctgaggttattattctatcagtccttttttttttttttttcctgagatggagcctcgctctgtcagccaggctggagtgcagtggcacaatctcgactcactgcaagctctgcccctgggttcacgctattctgctgcctcagcctcccaagtagctgggactacaggcacccaccaccacgcccagctaattttttgtattttttagtagagacggggtttcggcgtgttagccaggatggtctcgatctcctgacctcaagatctgcctgcctcagcctccaaaagtgctgggattgtaggcataagccaccgcgcccagcctatcagtcctttcaatctagaagtttatatttttcaatctggtaaatattttggaagtttttctggtttctctgtcctctcattgtagaattcctattagtcaaacattggacctcctggtttatctttttcttttcttttttttttttttggagatagagtctcactctgttgcctaggctggagtgcagtggcgcaatctcggctcactgcaacctccaactcccagattcaagtgattctcctgcctcagcctcccaagtagctgggattacaggcgcccaccaccacacccagctaatttttatatttttggtagagacagggtttcaccatgttggccaggctcatctcaaactcctggcctcaagtgatctacccacctcagcccctcaaagtgctaggattacaggcatgagccaccatacccagtgaatctttaatttgttaaataatttttctcctatatccaaattgctttgactttacttccaaatttttactaattctttttgggggacagaggattatcatattttaaaattttcaataagtttctatttattgaaagattatttatatatatatatattttgagagtctggctccatcagcctggctggaaggctggagtgcactggcccaatctcagctcactgcaacttcagcctcccaggttcaagagattctcctgcctcaggctccggagtagctggaactacaggcacgccccaccacacccagctaattttttttttcttttttttgtacttttggtagagaaggggtttcactatgttggccaggctgatctcaaactcctggcctccagtgatccgctggactcagcctctcaaagtgctgggattacaggtgtgagtcaccacaccccgcctgtgaaagatttttaagaatagtatcctaggccaaacacagtggcttactcctataatctcaacactttgggaggccaaggtaggagaatcacttgaggccaggagttcaagaccagcctgggcaacacagcgagaacttatctctacaaaacaataaaataaaattacacaggcacagtggtgcactcctgtagtcctagctactcaggaggctaaggcaggaggatcacttgagcccaggagctcaaggctgcagtgaactatgatcacaccactgcactccagcctgggcaacaaagcaagaccttgtctctaaaaaaacttaaaaatttttaagaatgaaaaagaaagacatttcaccactacctgattttaatctcaagcctcatctgtttcttaagagaccttttcctaccaagtcctaagtctctttcctaccaagtcctgagttttgttgagtatactttttgttgctgttcagtatacttgcttctccctgacaagcccctctaaaaacaacaaagggtgtagtttcctccgcttagctaaatcacttaacacccttctaacttttttgtttgttttttgttttattgagatggtgtctcgctctgttgcccaggctagagtgcagtggtgcaatcttacctcactgcaacctctgcctcccgggttcaagctattctcctgcctcagcctcccgagtagctgggactacaggtgcaggccaccacaccgggctaattttttgtatttttagtaaagacggggtttcaccatgttagccaggatggtctcgatctcctcacctcgtgatctgcccacttcggcctcccaaagtgctcggattacaggcatgagccaccccgcccgaacccatttttttaatcttctaaaaaataactgaagtttctcatgtattgtggtttcttctttcactcacttttgtccctgtgatctcatgtttcttttgttcccttattatcattttaatgctatttgaagaaaggaaataggtatattggatcaaacctccatgtttaaccaaaagtactatgcaatagttttagaagtactggataaaaatcataaagtacagtatatttaccaaccttgtggagattacaaagctcattagaataaataatgcctcaaacaacagaattagaattcaatgctttttttttttttttttttttttgagacagagtctctgtcgctgaggctggagtgcagtggtgtgatcttggctcattgcaaactccacctcctgggttcaagcaatgctcctgcctcagcctcctgagcagctgggattacaggcacacactaccaggcccaggtaatatttgtatttttagcagacagggtttcaccatgttggtcaggctggtctcgaactcctgacctcgtgatctgccagccaccatacccagctaatttttagtatttttagaagagacggggtttcaccatgctggccaggctggtctcaaactcctgacctcatgatccacccggcttggcctcccaaagtgctgggattacagatgtgagccaccgtgcccagctatgtgtttattttcttagagacagaatcttgctctgttgcccaggctgtagtggtatgatcatttctcactgcaggctgggctcaagcaatcctcgcacctcagcctccccagtagctgggaccacaggcatgtggtccacaccccactactttttaaatttttctgtagagacaggctctcgccatgttgcccagattagtctcaaactactggtctccagctttcctcctaccctcctccaaaagtgctgggattacaaacacgagccactgcatccaacccacataatacttcaaaatatggcaggcatggtggctcacacctgtagtcccagcagtttgggaggccaaggcaggaggatcatttgagcccaggagttgagcctgggagtgaggcttcagtgagccgtgaacattccagtgccctctagcctggacaacatagcaaaactcagcctcaaaaaaataaataaaatattaatggaattaatacatcttaaaaataatgtttgcatgtgtccttaacaaagaggatggtttaaaaaaaaaaaaaagaggaccaagcgctatgcctcacgcctgtaatcctagcactttgggaggccggggcgggcggatcatctgagatcaggagttcgagaccagcctggccaacatggcaaaacccagtctctaccaaaaatacaaaaaccagccagatacggtggcaggcacctgtattcccagctactcaggggttgaggcagaagcatcgcttgaacccgggaggcggagtttgcagtgagccaagatcaagccactacattccagcctgagtggacagagtgagacaccatctcaaaaaaaaaaagaaggccgggcgcggtggctcacgcctgtaatcccagcactttgggaggccgaggcgggcggatcacaaggtcaggagatcgagaccatcctggctaacacggtgaaaccccgtctctactaaaaaaaaaaaaaatacaaaaaattagccgggcgtggtagcgggcgcctgtagtcccagctactcgggaggctgaggcaggagaatggcgtgaacctgggaggcggagcttgcagtgagccgagatcgcgccactgcactccagcctgggcgacagagcgagactccgtctcaaaaaaaaaaaaaaaagaaaagaaaacattggcaaccttatattagccccttctacctcttttcacccatttcactaatctcaggcttttgtggatttcctagaacctgtcttatagaacagctgtataaagagttttgtcagaccgagggtgttggctcacgcctataatcccagcacttttggaggctgaggcgggtggatcacctgagtttgggagttcgagaccagcctgaccaccatggagaaaccccatctctacttaaaatacaaaattagccgggcgtggtggcacatgcctgtaatccgagctactaaggaggctgaggcaggagaatcacttgaacctgggaggcggaggttgtggtaagccgtgatccagcctgggcaatgagggcgaaactccacctcaaagaaaaaagaagggttttgtcatgcatgactttatgaggtaatctgccatcagccataaaaaaaataacaaaaatatgcttatatactttttttaaaaaatcaaaacttataggcatgagcctgttaatgcataaatatatttttttaaaattcagctatcttttctctggggccattcttttttattggatggagggcattctcttactgcagaggaagatcctctaagcttttacttggctgcaggcattctacagctagatgagggaaggagatggggaactacactactaattgtatagacttctcacttaattggctcctgacttccattttctgtctggaacttagctaaccccatcctcctctgggattggggtcctaggtcctgaacatctcatattcaattcctccaaagaacaaatctcctaacttctttttgttgtttacttttttcttttttttttttttgagacgaagttttgctctgttgcccaggctggagtgcagtggcatgatctcggctcaccacaacctccgcctcctgggttcaagtgattctcatgccttagcctcccaagtagctgggattaaaggcacgcgccacctcgcccagctaaaatctcctaacttctgtaaggctgacggtagctgtccaactactcaggtttaaaggagaaagtactgagagggaatctatcttcccattatagacttctggaaagtgaccctgttgtcagcctccatcttatccctgccttctgttgtacgtggtaccttcaggttctgaacttttcaggagcttcacagacaaatcatgacctgcctcttgccagtagtctcctgaagcacttgggtttgacccacctctcttctgctaagtcatttactatttctttctcttttcctttttcccatacaaggattacatatgcctcataatttcaaatagagtttatatcactgtttttaggtgattttcaaaacagcctgggaataattctactttgctgtcttaaaaccaaaaaaaaggccaggcacggtggctcactcctgtaatcccagcactttgggaggctgaggcaggtggatcacaaggtcaagagatggagaccatcctggccaacaaggtgaaaccccgtctctacttaaaatacagaaattagctgggcatggtgacgtgcgcctgtagtcccagctacttgggaggctgaggcaggagaatcgcttgaacctgggaggcggaggttgcagcgagccgagattgcgccactgcactccagcctggcaacagagcgagactctgaccaaaaaaaaaaaaaaaaaaaaaaaaaattggtaatcttttaaggcaaaaaaccttgaaaatgagccaatgactgtttaagggctaaatgtctgtttgataattttttttttttttttgagatggagtttcgctcttgttgcccaggctgtagtgcaatggtgcaatctcggctcactgcaacctccacctcccaggtttgagcaattctcctgcctcagcctcccaagtagctggcactagctggcactacaggtgtgtgctaccacacctggctaattttttgtatttagtagagatggggtttcaccaggttggtcaggctggtcacaaactcctgacctcaggtgatccacccgcctcagcctcccaaagtgctaggattacaggcgtgagccactgcgcccagcctgtttaataactcccaaaggataacaaaactgaaatcgagaactcaaatgcttgattaaattagactacttatttttcttttctttttttttttaatcagactacttgtttttcaaacatagcttatactgtctcatctctgtggcttcacatcgtctatatagaaacctacccatttttaatgctcagctcaaggcataacctccatgaaaccttttctgaccccctttgtagagaggaatgcctcttccccactcctggtttacacaaggaaaaactttctctaaacacactcctggctcctctgtacttctttaaagagattaagtataacttatcttttaatcttatttgactggcaaatcatggaagaatgaagtgcaacttggctcagagttctgtgtttctaccctttctgaacaagtgttctccatttcttcagggccaggctctctcctgcgttgaaaagcttgatttggtataggactgcttagaactgcgggctggggatgtctatctgatagacttcagttaacagatacaatttggctcacatactgaaaaccagatcttccaacctggtttcttttaataattttggtctccagctgccactcctgttttctccatttgtctagaaattctgcaaggatgaggaatgcttttcttgagacctcttcagaaatccgaatattttctaggtaggcatgttcttttatttccctataatccatagcactttgcttatagttctgttacaaagcttcaattttgtcttactgtgttcaattttgtctagcctactaggctgtagtttccggaaagtagattaaacatagtgccttacacatgacaagccacaaaacaagtatttgttggattaactgattgaagggctaaatgtttctttcaactaaaagtgaagatgattatatgggatttgttttgctttctttgttatttcaggtaagataaagtcacagacatcaccacattatcagtattgctagattatggccggacacggtggtccacgcctgtattcccagcactttgggaggccgaggaaggtggatcatttgaagtcaggagttcaagacaagcctggccaacatggctagaccccacctctactaaaaatacaaaaattagccaggcgtggtggtggtgggcgcctgtagtcccagctactcaggaggctaaggcaggagaatcgcttgaacctgggaggtggaagttgcagtgagccaagatcacggcactgcacactagcctgggcgacaaagcaaaactacgtctcaaagaaaaaaagaaaaaaaaaagaccagtcggaatggctcacgcctgtaatcctagcactttgggaggccaaggtggttggatcgcttgaggttgggagtttgaaaccagcctggccaacatagtgaaaccccgtctctactaaaaatacaaaaaaaaaaaattaatcaggcctgatggcgggtacctgtaatgtaatcccagctacctgggaggctgaggcatgagaactgcttgaacctgggaggcggaggttgcagtgagccaagaatgcaccagtgcactccagccaaggcaatagagcgagactccatctcaaaaaaaaaaaattgctagattataactaattttataactaagattttatttttccttgctataatatgttgggtcatcactgtttctgttttttgtatgtattgtctaggattcctaaaaactaattatacatcttctaaacctaaaactgaaaataattccatttacactgaggagacaactgtgccaaagcaattccaatgaaatggacagaatttaagcggacagctcaagctacttttcttttcttttcttttttttccctgagatggagtctctctctcttgccaggctgggtgtagtagcgtgatctcggctcactgcaacctccgcctcctgggttcaagcaattctcctgcctcagcctcccgagcagccgggactacaggcgcgtgccaccacacccagctaattttcgtatttttagtagagacaaggtttcaccatgttggccaggatggtctcaatctcttgacctcgtgatccacctgcctcggcctcccaaagtgctgagattacaggcgtgagccaccgcacccagctgctacttttcaataatataggacaaagacaatactcacagaattagtgtatcatcatcagtgactttagtggttaaaaataagcagcatataaaaaaagtgacgaggagaagacatggcccaagtagttgttgcggccatcttctgcaaaacaaaaactatgaactgagaaatacatttacttttgtataactggaggtcaaaataaggtactggagctcttcagaaacctccaatcaaacatgtactcggagatgacatcagtgaaaatgccacaataagaaacaaacgaaaaaaatttcacccctccataaaagcaacaataacaacaaaactggcaaaaatcaaatatttacagttagatagaagatacaagttctattgttccatagcagaacaggatgactatagttggcaaggatgtactgtgtatttctaagtagctagaagacttgaaatgttcccaacacatagaaatgataaatacttaaggtgatggatacccaagtaccctgacttgatcattacacattttatgcctataatacttatatgtaccccacaaatacataaatattacgtatcaattttgaaaaatcaaatttttttactttaaaaattaaccaagtcttgcaataacccaaggagttttcattcaagaaaaacggctgaatctcagtaagactagaggtttgtatcattttaatttaccccaaatgtgcctgttggcagtaaccttaaaaataacatccgtggctgggcgtggtggctcaagcctgtaatcccagcactttgggaggccaaggcgggcagatcacgaggtcaggagtttgagaccagcctgaccaacttagtgaaaccccgtctctactaaaaatacaaaaaattagctgggcatggtggcgggcacctgtaatcctggctacttgggaggctgaggcagaagaagagcttgaacccaggaggcggaggttgcaatgagccgtgattgcaccactgcactccagcctgggcgacagtgtgagactccatctcaaaaaataaaataaaataaaataaaataacagctgacattgctggtaactgagggaatggaacagatctgattcccaaagaactgtaatgatttgttttaacctgtctggtgctccctggaaaaccagctcaaaacgtttgtctttatattgtctcagaactggcctactgctaaagtaggtaccctgcatttgtcaaaaatatttataggcaaatgttttagtcactgctgactgagggacagataataaactaaccaaaaagcttaaaagagaagccagggaaaaaagctagggaaatgtatgtccataagggcattggtaagctctgatatattcatgagagtcagaaggccacatgcatgcccagcattgtgcacatactcaggaaagacctgagaaggcccagagttctcacctctggttgatcttgagaatttgcagaagtaggaagttgaaggctaagccagagttgtaaactgactggccgtgtgttcaaagtgtgcccctacacaaatgcctctggcaaagactaggagaatttgcggttctaggtattaagaaatttttgtacagtcattagctgaccactaagctaatggaacagagattttaacccaggtgcagtggctcatgcatgtaatcctagcactttgggagatcaaggcaggaggattgcttgagaccagcctgtgcaacatagtgataccctgtctctacaaaaataggaaggtgagccgggcattgaaaccacctttgcaaaattatgactgagacagtgaaagagatctaacttaaccgactccaccttgcttctaacctccaagctgcccttgttcattcctgggctgacctaactttaggataaactgagtttatagtttaaaacaaagaccgtaacagccctttcccaaagcagacctccttcttgcctggggactagattgcctctgtagtactaacattagccacaagattagaaattatggtttaggagtcatgaagctggaggctacaagattctgaccctccctaaactgctcctaagatcagtgcttgagatattttgcagaccctgcacttgatggatcagctggcaccacccagatcgattaactggctcatctgatcttggagcccccacccaggaactgactcagtgcaagaggacagcttcgactccctatgatttcatccctgaccaatcagcactcctggctcactgactttcccccacccaccaagctgtccttaaaaactctgatccccaaatgctcgggggtggggtggggtactgatttgagtaataataaaactcccgtttcccgcacagctggctctgcgtgaattattctttctctattgcaattcctgtcttttttgttgttgttttttttttttgagacggagtcttgctctgtcgcccaggctggagtgcagtggcgcgatctaggctcactgcaagctccgcctcccaggttcatgccattctcctgcctcagcctcctgagtagctgggactacaggcgcccactaccacgcccggctaatttttttgtattttttagtggagacggggtttcaccgtgttagccaggatggtctcgatctcctgacctcgtgatccgctccccctaggcctcccaaagtgctgggattacaggcgtaagccaccgtgcccagcctgcaagtcctgtcttgatagattggctctatctaggcagcgggcaaggtgaactccttgagcagttacagcatgctggcacatgcctgtagtcctagctacacaggaggatgaggtggtaggatggcttgcacctgggagtttgacgcttcagtgaactgtgattctagcctgcactctagcctgggcgacagagcaagaccctatcctccaccacctaccgccccccaaccaaaaaaaggacagagattttaaggtcacaaatgacaaatacagactgtacagaattaggttgggaaagacactaaacaaacaatactaatacaacaagtagaactaactgggagggaattgaatgtgatttccagagttgccacattataatatgcaaaatgttctgttttcaacaactactaaaatcacggtatgcatagaaattattttaaaatgatatgaatgtatccaaaacgaagaactcttataacccaacaataaaaatacaactaacccaattaaaaaatgggcacagaggtgtggtagctcacatttgtagtctcagctacttgagaggcgtaggcaggaagattgagcatagaagtttgagatcagtctgagcaacagagcaaaaccccatctcttgaaaatataaataaaaaactaaacgggcaaaggactaaacagacatttctacaaaggagatagacaaagccaacaggcacacaaaaagatggtcaacatcattcattagacaattacaaagcaaaaacacaatgagatactacctgacacccacacccactagaatggctataatttttttttttttgggatggagtctcactctgttgcccaggctggagtgcagtggcaccgtgttggctcattgcaacctctgtctcttgggttcacgccattctcctgcctcagcctcccaagtagctgggattacaggcgcccaccaccacgcccagctaatttttgtattttttaatagagacagagtttcactatgttggccaggctggtctcgaactcctgacctcaggtgatccgcctgcctcggcctctcaaagtgctgggattacaggcgtgagccaccgcgcccggccataggatggctataatttttaaaaaaacgaaaataggccaggcacagtggctcacgcctgtaatcccagcactttgggaggccgaggcgggcagatcacctgaggtcgggagttcaagaccagcctaaccaacacggagaaacccggtctctactaaaaatacaaaattagctggggtggtggcgcatgcctataatcccagctacttgggaggctgaggcaggagaatcgcttgaacccaggaggcggaggttgtggtgagccgactccagcctgggcaagaagagtgaaactccgtctcaaaaaaaataaataaataaaataaaataacataataataataataaaggaaaataacaattgttggcaggatatggagaaacttgagcccttgtacactgctggtggaaatatacaatgatgtaactgctgtgggaaacactttggtgattccttaaaaagtcaaacatagaaattctaactttgggaggctgaggcgaggggatcgcctcagttcgagaggccagcagttcaagaacaagccttggcaacatagcaagaccccatcccttaccaaaaaaaaaaaaactggccaggcacagtggcttacccctataatcccactttgggaggtcaaggcaggaggatcacttgagatcaggagtttgagaccagcccgggctacacagcaaaacctcttttctactaaaaataaaaaaaattagctgggcgtggtggtacccatctgccacttagctacttgggaggctgaggtggaaggatcccttgagcctcaggagtttgagcctgcagtgagctatgattgtaccactgcaatccagcctggacaacagatcaagatcctgtctcaaataaataaaataacataaaataaataagtatataaaatatttaacaattagctgggtgtggtggtatatgcctgtggtcccagttactcaggaggctgaggtgggaggatcacttgagcccaggaggtcaaggctacagtgagccatgatcgcatcatggcactccagcctgagttgacagagtgagaccctgtctcaacaaagaaattagaaataaatatatatatataagttctactttcaaaagatatctagaatccaatcacttctccctgtctctactataatcaacttgatgcaaaatattaacatctcctttctcatttattgcaagagctaagaacactggttacaacatcacagtctacacaaaacaagagtgatactcaatatgagttatatcacgttcctcttctgctgaaaacagaacacaattcaaaaacaaatctatgaatgtatggcttactttgtaagaataaaattcagagcttaaaatggattacaaggccattcattatctgccctgctctctaaccaccaccaccaccctgttccgaattcccaccaataactctgacctcatccctaccactgttccccaacttcactatgatctgactacagtaacctaccactgttcttagagtacatcaaggacactgcaacttttgtttttgcacttactatcctttggctataatgatctttcctctgataaccacacaccttgctttatttcattaactctgctcaaatattaccttaatagtgaggtctcctttaccattctctataaaatgtgaaccatgctcagctcccttcccccctttcctgccctttattttgcccatcactatcattaacatctggcatattatttactcttttatgttgtcaatctcccctcactagattttaaactccattagagcaggactttttgtccacttttatacgctcagcatctataagaacaccaggatgtaaaaagtgcaccacaaatatttgctgactgaattagtgatgagaaaaatttaacaggaaagagaaaactcacctgtactaccattaaaaactatagaaataaaactagcaggccgggcgtggtggctcacacctgtaatcccagtacttagggaagcagaggccggtggattgcctaaggtcaggagttcgagagcagcctgaccaacatggtgaaaccccgtctctactaaaaatacaaaaactagcagggcgtggtggcaggcacctgtaatcccagctagtcaggaggctgaagcaggagactcacttgaacccgggaggcggaagttgcagtgagccaagatcaagccatggcactccagcctgggcagtaagagtgaaactccgtctcaaaaaaaaaaaaagttgttaataaaagctaaataacaggccagacacagtggctcatgcaattccagcactttgggaggctgaggcaagaagactgcttgagcgtaggagtttgagaccagcctgggcaacagctagaactacctcatctccacaaaaaaatacaaaaaattagccgggtgtggtggcatacacctctggtcccagctacttaggaggctgaggcaggaggatcacttgagcccaagaggcagaggttgcagtgagacaagatcgtgccactgcactccagcctgggtaatacagtgagactctgtctcaaaaaaaaaaaaaaaaaaaaggctgaataaagcctggcttgtagttcatgcctgtaatcccaacattgtgggaggccgaagcaggcagataacttgagcccaggagtttgagaccagcctgacaacatggtgaaaccccgtgtctacaaataaatacagaaatcagctgggtatggtggtgtacacttgtagtcttagctactcagggggctgaggtgggaagattactggagcggtggagaggtttaggctgtagtgagccatgattgcaccattgcactccagcctgggtgacagagcaagaccctctctgaagggaaaaaaaaaaaaaaaaaggccgggcacagtggctcatgcctgtaatcccagcacttcgggaagccgaggggggcggatcacgaggccaagaggtcaagaccatcctagcaaacatggtgaaaccccctctctgctaaaaataccaaattagctgggcgtggtggcacacacctgtagtcccagctactcaggaagctgagcaggagaatcacttgaacctgggaggtggaggttgcagtaagcccagatcaggccactgcactccagcctggcaaacacagcgagactccgtctcaaaaaaaaaaaaaaaaaaaaaatccattcccctaaattaacattattgtattataaattaaaaatagatggcttggcgcggtggctcacgcctgtaatcccagcactttgggaggccgaggtgggcagatcacaaggtaaggagatcgagaccatcctggctaacacggtgaaaccccatctctactaaaaatacaaaaaattagccaggcatggtggcgtacgcctgtagtcccagctgctggggaggctgaggaaggagaatggcgtgaacccaggaggtggaggttgcagtgagcccagatcgcgccactgcactccagccacagcaacagagagagactccatctcaaaaaaaaaaaaaaaaaaaatagatgaaaggaacaggccttagttcaaaacagacttatgaatgtattcagctttattatagatatggcttttcaaaaccaggggaaagcctgggcaaagtggctcatacctgtaatgctaacacttcaggaagctgatgtgggaggatcacttgaggccaggagttttagaccaatctgggcaagataggagagcccactgctacaattttttttttcttttttaaacttgcccaggtgtggtggcatgcacctgtagcgcagctactcgggaggctaaggtaggaggatcactagagctcaggagttgcaggctgcagtgagctatgatcctactctgcactctagcctgggtgagagagtgagacgttgtctctaataagataaactaaattttaaaaatttaagaaaaggtcaggtgcggtggctcacgcctgtagtcccagcactttgtgaggccgaagtgggcagatcacaaggtcaagagatggagaccatcttggccaacatggtgaaaccccatctctactaaaaatacaaaaaaaaaaaaattagctttgcatggtggcgtgcacctgtagtcccagctactcagaaggctcaggtcggagaatctcttgaacccgggaggcagaggttgcagtgagccgagatcacgccactgcactccagcctggcaacagagtgagactctgtctcaaaaaaaaaaaaaaaaaagaaaaactgaaatattcatataatggaatactatgtaacaattaaaagaaatatatccaacagacctctaaaaaacataaagtttcagaataacagacacaatataaggtcaattatgtaaacacacatacacagacgcacatggagaagaaaaaccttggtcgggtatgatggctcatgcctataatcttaacattttggaaggctgaggtgggaagatcaaatgaagccagagttggagattagcctgggtaacagagaaagattctgtctccaaaaatgaaacagaaaaaccctacaaggataatcaccaagtctgtaactgtccttatctcttgaagtacagagtagaatgaagaggatcagtgttataggtagtgtcagagtctctttttgtgatactttatatgctttttttttttttttttgagatggagtctcattctgttgctcaggctggagtgcagtggcgcgatctcggctcactgcaacctccgcctcccaggttcaagcaattctcctgtctcagcctcccaagtagctgggattacaggcgcatgtcaccatgcctggctaattttttgtattttagtagagacagggtttcaccatgttgcccaggctggtctcgaactcctgagctcaggcaatccacccacctcggcctcccaaagtgctgggattacaggcgtgagccaccgtgccgggctactttgttatgttttaatttttaaaaaatttattcatgtaaattttatacataaaatttacaggccaggcctggtggctcatgcccataatcctagcattttgggaggccaaggcaggaggactgcttgagctcaggagttcaagaccagcctgagcaacatagggagactccatctctacaaaaagtcaaaaaaatcagccaggcatggcagcatgcgcacatggattcagctacttgggagggtaaggtggaagatcactagggcccaggaagtcaaggctgcagtgagctgtgatcatactcttgcactccagcctgggtggcagagagaaaccctcctcaaaaaaataaataggccaggcgcagtggctcacgcctgtaatctcagcactttaggtggccgaggtgggcagatcagaaggctaagagttcaaaacctcctggccaatacggtgaaaccccgtctctattaaaaatacaaaaattagctgggagtggtggtgcgcgcctgtagtcccagctactcaagaggctgaggcaggagaatcgcttcaacccgggaggcagaggttgtagtgagccgagatcacgtcactgcactccaccctggaggcagagcaagagtccatctcaaaataaataaataaataaaatataataaaatttatatataatttgtataaattaaaacttatttctaaaggtggagaagaagaggtgctaaactatatgtccagtataatcttgtttgttcataaaatatagaaatagattacataatttggccgggcacggtggctcacgcctataatcccagcactttgtgaggctgaggcaggcagatcacaagttcttcagcagttcaagaccagcctggccaacatggtgaaaccccgtctctactaaaaatacagaaattagctgggcgtggtggtgtaatcccagctacttgagaggctgaggcaggataatcacgtgaacctgagaagcggaggttgcagtgagccaagatcacgccactgcactccactccagcctgagaaacagagactccgtctcaacaaaagataaataaataaaataaatagatgcataatttataaaaggatacataatacacaattaacaatggttactgctggggcacagtggcacacaatggctcacacctgtaatcccaattagctatgcatggtggtgcatgcctgtagtctcagctacttggaagactgaggtgggaggactgcttgagcctaggaggtcaaggctgcagtgagctatgatggcgccaccgcactccagactgggcaacattgtgagacactgtctctagaaacacacacgcgcgtgcgtgcacacacacacacacaagctatgatggtgccactgcactccagactgggcaacactgtgagaccctgtctctagaaaacacacacacacacacacataaatggttacctctggggaatgaggtggggagaagaaagacttactttttaacccaaactcactttaagataaatagaaaattgtattttaacttcccttcccagcacaaatactaaagcaacagtttaacctccatttccagtctgaaattaaaccacaggcctattcctataactgtcttattttagtaaaacagaagtgggtggaagaaagatatgtcactgaaacacattaaactgagagacttgaggctactgtaagaacagccaaggaggttgatgctcaagtttccttaactaaaataatggtaacaattcacagagactgagcagtccaactcagctggagtgaatgaaaactacaagaaagttaactgaactagttctccattaaattttgattaggcagccaggcgaggtggctcacgcctataatcccagcactttgggaggccgaggtgggcagatcatgagctcaagagatcgagaccatcctggcaaacatgatgaaatcctgtctctactaaaaatacaaaaattaattgggcatggtggcgtgtgcctgtagtcccagctactcaggaggctgaggcaggagaatcacttgaacccgggaggcagaggttgcagtcagccaagatcgcgccactgtactccagcctgacaacagagattccgtctcaaaaaaaaaaaaaaaaaaaaacaccaactaatcagtcctgctgggcgcggtggctcacacctgtaatctcagcactttgggaggccaaggtgggtggataagaggtcaggacatccagactaccatggctaacacagtgaaacccggtggtacgtgcctgtattcccagccactccagaggctgaggcaggagaatctcttgaacctgggaggcagaggttgcagtgagcggagatcgcgccactgcactccagcctgggtgacagagcaagactctgtctcaaaaataaataaataaataaataaaaattaatcagtctagggacgggtgacgtgactcacgcctgtaatctaaacactttgggaggccagggcggggtggatcacttgtggtcaggagttcgagaccagcctgagcaacacagtgagtctctacaaaaaatacaaaaattagctggaagtggtagcgtgcgcctgtaattccagctactcaggaggctgaggcacaaaaatcgcttgaacccgggaggcggaggttgcagtgagctgagatcacgtcactgtactccagcctgggtgactgagtgagactccgtctcaaaaaataataataataaatttttttttgcttagacctctatcttatttccatttttaaagagtaccattagcatgaagcatagtaaatacctacaagtactatgtgactggttagggactttcaacctaaatgtgtatccacttctaattccacaaaagaacactatttccaataaagattatgtggagcacacatattctcccctacttcccagactgatattgcattgaatcttgtgcttttttgttcttatgttaactcacctctgaagaaatactgtttctagtaatactgaccaaacatcagccatctgacaacagccagatcatgtaaagaaaagaataaaactgtatgcttgctaggtatgtaatacaggtgttccctgacttacgatggtttaacttaagattttttgacgttacaatggtgtacacgtaatatgcatcagtggaaactgcaatgagtacacgcacaaccattctggttttcactttcagtagtcattaagttacatgtgatatttaacatttttattataaaacagctttgtgttagataattttacccaactgcagactaacggattctgagcatgcttaaggtaggtgaggctaatctatgatgtttggtgggttaggtgtattaactgcactttttttttttttttttttgagacaaagtcccactcttgtcccccaggctggagtgcaatggcgcaatctcggcttgctgtaacctctgtctcccgggttcaagcgattctcctgcctcagcctcccgagtaactgggattacaggcgcctgccaccatacctggctaatttttgtattttagtagagacggggtttcaccatgttcgccaggctggtctcgaactcctgacctcaggtgatctggccgtctcggcctcccaaagtgctgggattacaggcgtgtgccacagcgcccaatctttttttttttttttttgagacaaggtctcactctgtcttccaggctggagtgcagaggcatgatcttggctcactacaacctccacttcctgggctcaagcaatccttctacctcaccctcccaagtagttgggactacaggtgtgcaccatcatgcccagctaatttttaaattttttgtagagatgaggtctcactatattgctcaagctggtcttgaactcctgggctcaagcgatcctcccaccttggtctcgcaaagtgctggggttacaggcgtgagtgaccgcaccaggccttaactacgtttccaacttacgatactttcaatttatcataggtttatcagggcacagtcccatctgtattataaaaactaaaaaggtaatgtgatgagttaattacatatttcatttgaatatatatttgacagtggttagaggatcagctagatcttgaccacaacttcagaacgccatttattgagaccacttataatgcaaatttcacattattgaaataataagtaatataaatgcttgagaaaatggtattattttttcttggtattctttctatattaaaaacttattttgaccaggcatggtggctcacacgtgtaatcccagcactttgggagaccaaggcaggcagattgcttaagctcaggagtttgagaccagcctgaccaacatggcaaaatctcatctctactaaaagtgcaaaaaaaatagctgggcatggtggcacacgactgtaattccagctactcgggaaggtgaggcacaagaatcacctgagcctggcaggtggaggttgcagtgagccaagatcgcactactatggctccagcctgggcaacagaacaagaacctgtctcaaaaaaaaaaagttgcttttttttttttaattttttttttttgagacggcgtctcgctctgtcgcccaggctggagtgcaatggcgtaatctcagctcattgcaacctccgcctctcgggttcaagcaattctcctgcctcagcctcccgagtagctgggacaacaggcgcccgccaccatgcccagctaatttttatacttttaatagagacggggtttcaccatgttggccaggatggtctcgatctcttgacctcgcgatccacccaccttggcctcccaaagtgctgggattacaggtgtgagccaccgcgcccggcaaaagctgcattttttgttgtgctttaaaaaattagatctgccgggtgcagtggctcacgcctgtaatcccagcactttgggaggctgaggtgggtggagtacctgaggtcaggagttcgagaccagcctgaccaacataatgaaacccccatctctactaaaaatacagaaaattacctgggcatggtggcaggcgcctataatcccagctactagggaggctgaggcaggagaatcgcttgaacccgggaggcggaggttgtagtaagctgagatcacgccattgcactccagcctgggcaacaagagcaaaactccatctcaaaaaaaaaaaaaaaaaaaaaaaaattagatctacatttgggaagcttcttttatataaccccagtcaactgtgactaagaatactgaataataatgaagtttcttatctccctgcagttactattcatgataatgtacaaggaaagttatagtattaaagaaaagttttaaccagtcctaggagaacgccaagatacatcaggttgcttttctacaagtgggtggcagaaataagttgtgatatgattttgtttaatatgaccttcttttctttacatgaaacacatgcaaacgattttcaaaaagctgataaggacgaatgtcgggaaagggtattggcaatgcagtgctcgttttaaaaaataaatgcaggccaagtgcagtgggaaagggtattggcaatgcagtgctcgttttaaaaaataaatgcaggccaagtgcagtggctcatgcctgtaatcccagcactctgtgaggctgatgcaagcacatcacaaggttaggagatcgagaccatcctggctaacacggtgaaaccctgtctctactaaaaatacaaaaaattagccaggtgtggtggcaggtgcctgtagtcccaactactcaggaggctgaggcaggaggatggcgtgaacccaggaggcggaacttgcagtgagccaagatcgcaccactgaactccagcctaggtgacagagtgagactctgtctctaaataaacaaataaataaataaatgcatctttaatgtctgtgtttaatcatgtcatagctttactttctacatatcagagaaggaagaatgacccatttctgggggcggaggtagggtgcggttaaaagcttgctgatccagtgttttagatgtcaacttacaatttggtgccagattttcatcttaggagacacttattcatatttgcctaacaatgagtacaataatagttgcagtataaattctagactgaaacactactaaattattactgttgaactagattaaaattcataggcattcctgtttaataaacccaatataaaaaactgattaggctgggtgcagtggctcatacctgtaatcccagcactttgggaagccaaggtccaggagtttgagaccagcctgggcaacatggcgaaatcccatctctacaaaaaaatacaaaaattggccagacgcggtggctcacacctgtaatcaatcccagcactttgagaggccgaggcaggtggatcacctggggtcatgagttcaagactagcctgaccaacatggtgaaaccccgtttctactaaaaatacaaaaattagccaggcgtggtggttggcacctgtaatcccagctactagggaggctgaggcaggagaatcactttaacctgggaggcagaggttgcagtgagctgagatggcgccactgcactccaacctgggtgacagagcgcaagactccatcttaaaaaaaaaaaaaaaatagccagatatggtggcacccacctgtagtcccagctactggggagacagaggtgggaggatggcctgggccccagaggtcaaggctgcagtgagccctgatgtcaccactgcattccaacctgggtgatagatcaagaccctgtctcaaacaaaaactgagtcagataaataaagaggtcattagtaggccaagtacagtggctcacgcctgtaatcctagcacttttggaggccaaggcaggtggatcacgaggtaaggagttcaagaccagcctggtcaagatggtaaaaccctgtctctactaaaaatacaaaaattacccgggcatggtggcaggcgcctgtaatcccagctacttgggaagctgaggcagagaactgcttgaacccaggcagaggttgcactgagcagagacagctccactgcactccagcttgtgcgacagagcaaggctctatctcaaaaaaaaagatcattagttgtattcttccctctgtaaaaggatttttccattaaatagtaagttcctctaaagcatttaaaatttatttgcagttcggtgcagtggctcattccagtaatcctagcactttgggtggccaaggtgggaggattacttgagactaggagttggaaaccagcctgggcaactagtaagaccacctgtctcaaaaaaaaaaaaaaaaaattattaagaaaaaaaaagaaacaagcaggaatcgaaagcagtatataggataatattacaaagtctaactggcttttctttaatagcagatgtaagcaaagaaatctaagaacactggcaataaactgactatctaatctctctccagagaatcacagaatttccatgctagaaggaaacagagttgagacaatgtaggtccagagacgtaacttacccaaggtcccacagacaccagtaatactagaacttcactagaatatgtataatacacacaaaaaaaaacacaaatttatataaattataagagtacattttgtttcatagttcggaactgactcccttcgtaaaatcctgatgacatcaccttaaagctgtcattgtctccttatccaaattaatttcaaaataataacatcaaaagatatagatgatctggttccaaaaaacaagatgaaaaaacattccaacagagagctctggaaaaccttgtagctaaaatttaaatcgtttatttgctacaaaccacaaatcccttctccctttctttttcttttccgcaactacctctaaaaaggaaaaaaaaaaaaagggctgggtgtggtggctcacgcctgtaatcctagcactttgggaggccaaggtgggtggatcacaaggccaggagttcgagaccagtctggccaacacggtgaaaccctgtctctactaaaaataggaaaaactggtcgggtatggtggtgcagtaatcccagctatcgggaggctgaggcaggagaatcgcatgaacgcaggaggtggaggctacagtgagtcgagatcacgccactgcactctagcccaggcgacagtgcgagactgagaagaaaaaaggaaaagaaagaaaacagccaggcgcagtggctcatgcctataatcccagcactttgggaggccaaggcaggtggatcacctgagatcaggagtttgagaccagcctggccaacatggtgaaaccccatatctactaaaaacacaaaaattagttgggcatcatggcacgtgcctgtagttccagctactcaggaggctgaggcaccagaatcacctgaacctgggaggcggaggttgcagtgagcgaagatcacaccaccgaatcccagcctgggcaacagagtgagattgtctccaaaaaaaaaaaaaaaaagaaaagaaaacaaaaaacaaaagtagctctttttcaataagtgcaattcagtatacagtgcgttggcttttcttggacctataaaaaaagggcgacatatacaaaaaatgctctacacttaagaacctaccctaatctaaaacttttagttttctttttgcctgtccttcctgccacatataattcctcactctgcagatagtaagccaaacatgaagtgcccagaatagctatacgtatggtatcttattatcacaaattaaaagtaaaactgaggctgggcgaggcggctcacccctgtaatcccagcactttgggaggccaaggcgggtggatcacttgaggccagaagttcgagaccagcctgaccaacacggtgaaatcccatctctacaaaaaaatgtaaaatttgccgggggtagtggtgcatgcctgtaatcccagctacctgagaggctgaggttgaacccaggaggcggaggagccgagatcgtgtcatcgcactccatcctggacaacaagagtgaaactccatctcaaaaaaaaaaaataggccggcacggtggctcatgcctatactctcagcactttgggaagccaaggcgggcggatcacctgaggtcaagagtttgagaccagcctggccaaaatggcaaaaccctatctctactaaaaataaaaaaattagccaggtgtggtggcgggcacctgtaatcccagctactcaggaggctgagccaggagaatcacttgaacccaggaggcagaggttgcagtgagctcagatcgcgccattgcactccagcctgggcaagaagagcgaaactgtctcaggaaaaaaaaataataaataataataataattaaataaataaataaactgagaacgcttccccagttttcactttgaaatgcattctccacttgatcagaaagtcataccaacaaacaccacagtggttactacatttgattaagtttgggctgggattttatatatttattgccaaccttcacttccatgttgttagataaaatttctgtcttagcaccatagtaatgcctaagatcaacttaattactcacttacatggaattggatttccttttttgttttgaccagaaattcctgggatcaaggacaaaaatgatatataaattcattatatttccacctgactacaactattagataagaggcttattaaaagagtatcataaaatcagtttgaagatacatgattagggtataagtaggttacttacttagagctataactcaaatgcctaataaataattatttaaactttgctgaatacccaataaaatcatttactttaagagaaagtcttcaaaagctaatgcaaatttggtttggatttatcatattaaatacgtatctttgttttttataaaagttatacaactaagcaagatgaattgagcacaaatactattgcacagttcaataccaccacctattgttagttgctgtcaagtaaaaatgttttatatatctaatgaatccaactacattaagacataaaactgtaaaccacagttggatgccttggctcttctgagccaatatttgggtgggaggggtctgatctaagaattcgcttagtctcactaagtctggaagatcaagtaggaaaacagtgtaaagacaactgtgcacaagtagctaaatttggtcactttaagggctttctttcttctccctccctcctttggattttcctggtgtcacggaatattttattttgaacatctaaaaatacccttctaaaaaccacagtactagttagattactgaaacttttttttttttttttttgagacagagtctcgctctctcgcccaggctggagtgctgtggctcggctcactgcaagctccacctcccaggttcacgccattctcctgcctcagcctcccgagtagctgggactacaggcacctgccaccacgccaggctaatttttttttttgtatttttagtagagatggggtttcaccgtgttagccaggatggtctcgatctcctgaccttgtggtctgcccacctcagcctcccaaagtgctgagattacagaatttttcttttctttttttttttttttaagacggagtctcattctgtctcccaggctgaagtgcgctggcacgatctcagctcactgcaaccttcgcctcccggtttcaagcgattctcccacctcagccttctgagtacctgaaattacacacactactacacgtctaatttttgtatttttattagagacagggtttcaccatgttggccaggctggtctcgaactcctgacctcaagtgatccgcccgtcttggcctcccaaagtgctgggattacaagcccgagccactgtgcctggccagatactgtacccggccagatacggaaatttttaattcagtttctagtatgttactagttgagaaacagtaatctaaagagtaggaatgagatccttggcctgtaagaaagcacttataaatttgcaagaaaagtgagatcaagatttgaaaacagacaactttgggaatgaaaagagatggatttttttaaaattaggattaaaaagcatcatcaacactaacagttaaaaactaacaaatgacctaaaacataagaagattttaaaagtgtgaccacttctaggccgggcgtggtggctcacacctgtaattccagcactttgggaggccgaggtgggcagatcacctgaggtcagaagttctagacaagcctggccaacatggcaaaaccccatctctactaaaaacacaaaattagccaggcatggtggcatgcccctgtaatcccagctactcgggaggatgaggcaggagaatcgcttgaacctgggaggtggagacttcagtgagccaagatcatgccactgcactccagcctgggcaacagagtgagactccgtctcaaaaataaataaataaaaggtaaaaggacccatgattatgcaataaagaaacatcaacaacactattcaaaaaggacaggtggtctgaatgggtccaaaaagcccaggcctttgctatgtattttctataagttagataattgttttcaaaccagttgctagagtgttaaaaacaaaattccttagtttcaccagtactcaatcccattgcaaaggttttcaaaagaaacaaattactgtcacccactagaaaaatatataccattttcacatgcaccaatttggaaatatggttattttctatgcacaatgttctttaaattagatgctaaaagttttaatggataaaaaggtctttattcagtcactttgtcattgtgaaaagcaggagtatgagtgaaatgatgtagagagaagctctggcattagaaagcagtggccaaaggctggatcctgagaggcaacactcattaccaggttagcagaagagagcgttccatgaaagagactgcaactcatcccggaggcatgaggagaaccaggaaagggcagaaccacagtcattcaaagccaagagttttgtggggtttttttttttttttaattcatttgttttagtaggtgtttcatgtattaaaagacttttcgaaaaaaaaaaaaaaaggtctttatttcagccttaacggtgtattctgagactgagcctacaaacttaaatattatagtggctgtttcagaagaaatggccagggaaatatgatcctctgcttttattcaaaaagcacagatgcataggattctagaaaaaaggtaccttagtgattgattctatctccctcgctttacagaagagggaaatcaccaagctagaaaagtaaaaagaatgaccaggccgggtgtcgtggctcacatctgtaatcccagcacttcgggaggctgagatgggtgtatcacctgaggtcagtagttcaagaccagtctggccaatatggcaaaaccccatctctactaaaaatacaaaaattagttgtgcatggtggcgggtgcctgtaatcccagctactcaggaggctgaggcaggagaatcgcttgaacccaggaggcggaggttgcagtgagccaagatcgcaccattgcactctgacctgggcgacaaaagcgaaactccgtctcaaaaaaaaaaaaaaagaaagaaatgaccaaagttacagttagttgctagcaaaaaattaagattaatatgcaggtcttgccgggcgtggtggctcacacctgtaatcccagcactttgggaggctgaggtgggcggatcgcgaggttaggagattgagaccatcctggctaacacggtgaaaccccgtctctactaaaaatacaaaaaaaattagccgggcatggcagcaggcacctgtagtcccagctactcgggaggctgcggcaggagaatggcgtgaacctgggaggcggagtttgcagtgagctgacatcacgtcactgcactccagcctgggcgacagagcaagactccggctcaaaaaaaaaaaaaaaaaaaatccaggtctctccactcacaatgtagtatgctctttttgccatgctgcattttaagatttttgttattctgttttttgtttgtttgagacaggtccaggtaatttttgtagtagagacagggtttcaccatgttggccaggctggtctcgaactcccgagctcagatgatccacccgctttggcctcccaaagtgctgtgattacaggcgtgagccaccatgcccagccagatttttgttactttggataaaatgaagcaagtaggcaaacaaatattacatgctagggttacaggttgcacataatattacagatttatacgaaaggcagtgacgtataatgaaaaacaataatgaacatggattcaaaataccgaaattggagcatatcactttctaacttatgggttcttatctccaggcactgtttaaactgtaaaatggtatctgaatgtcagttaatgttaccactatgattgttttttaatgttaggctttttaataaacccattaagacagaatttttctccaacagtactacatcctcataaagaagctactaagagcatgacaaagtggagaggcttaactgaagcaaatctaagcttagattcaagggctagtctagatatttaaacattaatctcactaagtgttaagataatgtcagttatggcacttaaaatgaaggcagtcaggtgtggtaatcacacctgtaattctaacactttgggaggccggcgaaaggattgctcaagcccagcagtagcaaatacaaaataaaataaaatggatgaactttggaaaagctcttttccacaaattttatagactttttgctagtcatgctaaaaaaaaaagcaggatgacagtggagtcaaaaaaaaaaaatgcagattggaatcctggttcccccacttactaggtgtgcaatttgaacaccttacttaacctctcaggccttcactttcctcaagtgtaaaacagaatcgtaaaactagaggtaactagccgggtgcggtggctcacgcctgtaatcccagcactttgggaggccggcgggcggggggggggggggggttggatcacgaggtcaggagctcgagaccagcctggccaacatggtgaaaccccgtctctactaaaaatacaaaaattagccgggcatggtggcaggcgcctgtaatcccagctactcgggaggctgaggcagtagaatcgcttaaaacctgggaagtggttgcagtgagccgagatcgcaccattgcactccagcctggggacaagggcaagatttcatctcaaagaaaaaaagcaacaaaacaacaacaacaacaaaaagctagaggtaactgaggtaaaacatctggctcagtgtctgtcatgcaggaagtattcaataaccatcgttaaatttgaaagacaattactaaaatttgctgcaaagtttaccataaataacataattaaaatatctgaatggtaagttttaattgattaacacaattcagcacatactatgttgacctacaagggttattactgtatacatttaatgccatggtgacacagcaagaaaaacatgaattttcacatctcttgatctcttaaatagagattctttattcagtagtcatctactttggctattccacaggatgctacacatctggctaacaggtactcaccctcgttgttttttgttttttttttggagacggaatctctcgctctgtcgcccaggctggagtaaaatggcacaatctcggctcaatacaacctccgcctcctgggttcaagtgattctcctgcctcagcctcctgagtagctggaattacaggtgcccactaccacgcccggctaatttttgtatttttagtagagaccgggtttcaccaggttggtcaggctggtcttgaactcctgacctcgtgatccacccacctcggcctcccaaagtgctgggattacaggcatgagccacctcgcccggccccttggttttaaattaaaaaaattttttttctatagctctaacccagagtgggagatttaaggtgtgtggcctccagttacaacatataaaagcatacctacaaaaggatttcaatgaatcaactatctgaaaatcatagagcttcagttatcttctccaagaaaaataaaccttacgtagccacaatttgaaattagctattatgtgatataaagatttcatgcatccacaaaaattctcaatgagatctgctatctgcttacagttgtaaaattatcagttctttaagaagcagactgtaatcttgaggatttaaaatatcatttgatgtaaatgtttagatctgctttatttacgtatcttttattgaaagtaaatatttaaaatattttcaacaaataagcaataaatttatttactacttcctaagaagccaattactaattgtctcagtccttgtaaattaggtcaataaagaggtaaatggttttaagaagtactcaatgaacttcattaacacatatcatttctagccattctcatctgtattccggcatggaacacttcacatcatattaagtgaatagcttttagtttataaacaaacacttatttaatcatgaaaccgtccaagaaggactccccaccttattcttttttttaccttctcagatcatatttagaaagatttcgttgccagctacatcagctacaagttaaaaagaaacctcttaatacagcaacaaatttccttattactttattatagtatgccacccctacagagattgtaaattaaagtataagataattataaaaatacaaaatagcaatgtaattttacaccacatacaagagaatactttccaaaaattattcaatctaaaatgaacagcaaactgataaagagctaattccacaggcaaaagactgtccccgactcaaatcttcagtatctggaactgcctttcaagattcctgttaactgctgaacgtctattcagcaattttagtgacattctgggtttttacggtactactgaatacgaaaccatcataaattaactttattggggctctgtacattagggccatccaatgtcctattaaacaccaaataatatattccataacattttcttctagtgatcaagttaaatactaaaactctaagaaggccaattctttgattttctccactcctgaagtgcaacagtaacactgaagctctgaacttaaactgcacccaaaacacttcctatcttgatcttcgtggatcaattcaaattatttcccagttcgcataataagaaatcaaagaatagattaaactgacaacccttaaaagttttcacaccctgaacctagttgtcgagtttcttaaacttttgtctcgccgtcttacaatttcatctctcaaatggagatgaagaaaaacaccgagtgagattgtccactgagctgtgagtgatcccaggtcagcctggttctctgccagaaaagaccaggtgacatttactcttcctgtagaagtttctttctcttgaccctcaaggaaccttccagtatattgttatactactgtaattcatcagtagttacaatatttcacttcccaaaggaatctcttccttgcaagatgactactctctaaagacgctttcaagaccgtccactcctcaattccaggacagtaaacctccctcgctagaggagaaaaagttcctgaaagacagaccggaatggatttgctgaactttcgtcccaatctcaaagcatgtagacatccaagggttcccaaggaacaatgagctacagaagtacagactaaacgggaaagcagaggaagtatcagaacaatacccaaaccaaacacagcaccgaaaacccgtggtagcctctatcatcccaaactaccgtccccacttccctagtttcaccaaggtctcaaactcggagaaatggtacccatcccctaatttcctccctcaacagacaacaaacgcgtcatgaaggtagcagcgagaaaagcagcaggctctggtggaccggagccgtgatggctgggtggaaggaggcaagccaagggttgtgtaaagaatggaaagctgagcgatcctggaggagggtggaattagggcgcccgagctaatcccccgcgggggcccgctggtgggaagagacggggggcgaaccggcgaggggactgggggcaccgggctgcgctgggcttctgggtcgcaagaaaggggagcggagtctggcagccccgccagtgggtgggtgacggcgcctgccagggaggaggctccgtgcggagcggacgttttgggattagagcgcgcgacccgccctcctcacgccgcccgagccccccaagctcacacctcaaacctgctcttggtcactccgttcacgtccctcctcatggggccggcgggtgcggcccgggccgggcgctgcggcgagcggagtgcacagaccgggggcccaggacaggcccgggagttccgggacggggactgggcgccggaggggtgacgccgggaccgtgggacgggaacaagagacctctcggctccggctaggcctccaccacctcccgcggcgccggcggccgcaacgactgctcgtcgctagctcggctctctcctcagcctcaacttcaacccaaaacaaaaacactccccacctgccagcaacgccgctgctcattggacagagccgcccgggcctcggagcgcccgggagggggaggggcgggaggggaggagcgcggcggcggcggcgcgagaccacccctcccccacacggggccggccctgacggcgctcccgggagcagccggtgcgcggcggcggcacgaccccctgcgcctccgaggcagacgagcccatcgggagaaggcgaggcagggaagtgcctgtgcgtgtggaaaagggggtctgtggggcggatgcgagtgcgcgcgtgctcgcggaccagcgagggagagtagagcagtaccgcactctgcgcgggggcccctcttctgccccgtgtccccctctcctccctccgcgggcaaacaggcacgcacctgcctgcacagaacctcagcctctgcccgcgcccgtcgcccctcgtcacttgttccccaggatcctgtaaggcacccgcatccttcccggccacccagctcccttcccctgtcactcactgtcgccttgaacccaaagtgcagcaggcggtccctgctcggagccattttcctcctcttctggatgtgtctagattggggcagtgcggctgccgccgcgcctccgcggttgccgccgccgccgcctcccccgcctcccccgccccagtgcattacattacggggtgctgcagggaggcctggggggccggggccggacgcttgtctccctgtgcatggctcgggagggcgagggtggttgcgctgagcaacaggccaagtgcccgccctggtccggggatggctgcggagctgcacctgaggccgggggtcgggggtgcagggctggagccgggcaacccttcctttggccggggtcggggcgcgcgtccgtgggggtggggcgggcgagaccgaagagcctttggttttccttgctcggccgccgccggcgcccaatgggctgcagcgcctgcctgtccgccaatcagggcgctgtttggtgagagcttcggcctgacgtcactttggcgggagaaacaagcgtgtgtgagcgagtaggcgggggcgttttcccgatggaaacacttcatcagactcccgggctccttgtatagaagctgatctgtgtcatcatattatattatgttttaacaactctggccttcaaggtctcagaatttatgaccgaatttccacgaaggaataacacaggattttgtagttttgttgccccttctatgagcaacaaactacaaaattatgtcctaagagtgaactattagaaactgtataataaattccagcacacctggcaggagcagcagcactgctaattgtatgcttccaaagcagttatgagttggtcttcctcacaccccttttaattagtggttttagcgactgacttgttatgcgtctaagaaattaacaagagcaacaagtgcggcagatctttaagaacaggtatattttagctggaggacatattacccaactcttaaagcactgtacaaactttttctttttttttttttttttttttttgagacagaggttcaactctgtcgcttaggctggagtgcagtggcacgatctcggtttactgcaacctctgcctcccgggttcaagcctcccaagtagctgggattacaggcgcgccgcgccgcacctggctaagtagagacgaggtttcgccatgttggccaggctggtcaggaacacctgactacaagtgatccgcccgcctcggcctcccagagtgctgggatcttttttcttttgtagagacggggtctccctatgttgcccagactagtctgcaattcctgggcccaagtgatcctccagcctcctcccagtgctgagattacaggcctcatgtgagccaccacgaccagcgcgccaccccccggctttttttaatcctagagggggcttcctaaaaccagggacctagcttcagaaactcattctcaggcccacaaacccaggtctgtcttctcctcctgtcccaggtacttttaatgtttttgcttgacttcagccagtggaataaaaaagccttttcattctgtctcatctaagagctgttttctcccagcaaaaactgatgcatttggtgagtaacaatggcaaagggatggccgggcgcggtggctcacgcctgtaatcccagcactttgggaggccaaggcgggcggatcataaggtcaggagattgagaccatcctggccaacatggtgaaaccccgtctctgctaaaaatacaaaaattagctgggcgtggtggtgggcgcctctaatcccagctactcgggaggctgaggcagaattgcttgaacccgggaggcggaggttgtagtgagccaagattgtgccactgcactccagcctgggcgacacagcgagactccatctcgaaaaaaaaaaaaatggcaaagggtagaaaaactggcctacagagtaatagaatgaagacaagtttcacagctccgtcagttaccagttgacccatttcaagtagtactcagggaagacatttactgttgactgactctttaaaattgactggagttttgaacaaatgaaaaaagtattcaaaggctaaaattttattacacacaggcaaattactttttatcaaagaagtttatttgcatgtaaataaacaggttattttgtaatgtttcgggaaaaaaatcccacaacagatttcatctactttcaaaaaaatgaaaaaccccaaagtatttacaaaacggccatatgcacagaaaaccaaatttgaaagatttttttaaaaaaagaccctccccagctgctcctgatgtacatttttaaactcaaaatttaaagctcagttcttatagctgagcatgtttcccaatctagcttctgagatgttaagtacttcctgcccctccaaaactaactcaaggatagaaatgtatggggggcaggggaggaggggagaaggaaaaaaaaatgagattgcccaaggattgtgaataatgtttcgtatactgacatctttaagtgactcaactgtggatactgtatgactcactggctccctgaaagggcttctgagaattcatgatattgctgcacttaattttctgatctaggcctgaagaaagaaaatctttcaagagtcaccaacctcaagcctggttttggcaattatatcctgcgttgtttgtccccaccaccccaccccccacccgctaaaatacttctgttttaagacacattgatattgaacctgaaatctttatgtacatcagagcaggttatgaccaagaacccctaatgttaagtcaaaagacagaagaggaatcaggtcaaactgagaatacataagacaccagcagcagaagataggtagaagttgacttcatgtccttgccttcttttgaaacagaagaatgagtacacctagacaggagggaggtgtcccaggcttggtttattctgcctcttctcctccaccctgtggagaaatgcagtgctccctggttctcaggcagggtgaagcagtttagccccggctccctgttaagcaagttcagatgctgggtcagtgtgggggtgagcccatcgacaattcaggggcttatccttcatccagatcctaactcgggattctttgatctgggatgaagacagaaagagagaaaagcttcccagtttactcattttggtatttgttggccctgcatgggggagctgagcccatgatactattcagtacattccccctaagattctccccactcagaacaaattttaaaaaccacataaatttttttttttttcctgcagaaaccaacgggataggattcaaaactaggtgacaaactcatgagaaatccaacctggctgaatgtctgagaggctgctactgtatcaacatcacaagataaagcactctggtatcacctgcccatatcctccttagtgtcacccaagacatttgactctgatgtggttaattgataacttttcttgctccactttacaatgttttgtttcctacatcttattaccttgggacacaaaagtggcagagttgttgagagctgatgacaataaaaaggagaacactagaggaaatgagacaggaaagaaagccaaagctgattttccaactctatgctgactccaacctgcagaaaaagctgaatatagaaatcttcttccatatatgatgaagtcactccacttacgacataacacacaaaggaatcacctggctttttttttttaacccagaagagttgtgctggggaccatgccccatcccgctgatacagatcctgaatggaataatcaggaatggcacagtgcaggtgtcaatatcaaagtaaggccgcagaatttttgagaggaccctccaaatactgagaacttctgttgcactcgaaacagtctcctggatttctatatttttatgtgaagggctcttattgatgtcccccagaatccagactcagacctatttctccaaaaaggtccaattgggttgctacatagtagcaagggtttatcttcatgctcacctagcattccaggcccccattacttcaaaagtgagcttgaaattgttttaagtgaactatggctgcggattttttactgttttatctcagggagcatacagtggagtgattaaagtttggactccttctccttgtgatgaagagaaacagtgagtccagctcttaggaatggcatcagttctcctgcaaacaaaatgctgggatgcagacttttggcacattgtggaagtaggagaactattaatcctgtaatggttttcatgccactgggtcaggaaggctgtcctacactaaaccttactgcatctgaaaacatgtttacatcccaacaagccaccttagcttttttttttttttttgaaaggaaaatgagattacaagtcaatacctccacagagaggtaactcctaatattcctatgatctctgaaccctatttaaaccctcctaaaataaaaatatcattttggtttttctattatatttaactctaaaggcgggctctgactaatttgcttgggcttgatgctacagtattagcacaagctataagctccctaccaccatataagccttgctcttcggccttccatcattttgaaccctaaacctcatagatttagaacgaaacactgtataaaaacaaacagataaagggttaaaatattacaaataaatagctaaaataatcttccctcccccagtcactcctaagaaacagacaccaaacattacttaagtgtccaaaatgaccaaagtccttcatttgcccatgactcaaacggacaactacctcaaacaaagttgaacaaccttcatgcaaatgcatcaaggaatgtattgctttttcattttctgcccagcccttcatatacatgcactaaaatgagtttaaaacatggcctaaaaatggaaaaagggagaagaaaatatatatgaatatttcccacaaaactgtttccctcccttccctctccctacacccctcccacccccctccctttcttaagcaagtattttaactttctttctggcacaggaacaaagaagacttcctggtaaccagaatcaaaccctgtggtttctttaatagggtctggatatgcctttctaattcacccagcttgatgtcaaagccatgccatttaggattcttaaccaaatcagacctgtctgactcaccccttatggtggtttgcctataaacttatcaatagttttttttcctctggccctgtttcttttaggaaataaggttcctaattcccaatcagggccacatccataagatcatcatcttcctccccaatcataaagtctgggctgagccttgagggtctgtctgcagataagattgtgttacttgtcatagacaaggactggtctgaagagatgggtgatttggaccaactctctggcttgatgctatgagattttttcttgtctcggtctttgtcccggtctcggtccctatctttgtcttttactttcttcttttcctttttgtgcttcttatgtttctctgtgctgtattctggaagtggtcggataccatcgtctgagctgggactattctgataagatttctctgctatggaggagcctgactcactttcactgtccagattctggggggtatatgctggtgacttactatggctgggagagccacgctcatgctttggagtggaaccactgatgagtggagagccatagtttttagaagaagccatttgaggcctaagcccttctccactactttccccaggtttctgcaaagtcactttggctttaatgctaggggagcctccatcatgcttactgatgataatttttgccacacctgtgctccccacattttttgactctgaggtcttcttagaagaatccactgaactcccggaggtggaaacctttgatttgtctttatcacttttctcacgcttgccctgaaactctcctcctgacatgttatgtttggaggacataggatggctggaagaatttgtgctcacccccatctggccgtccagtgggtcttcacccccagggccactggtgacaaccccatgcttcagtttatctatgacagctgtcaaggacggcttcttgtttctgctgggagattttcctttagaactcccatgctggttctgagaggatgacatggaagagccacttgaggaaaaggaggaggaagatgccgtacaggaattagatgatgggggagttttctgggacaacgagcctgaggatcctaaccctgaagatgacttcatgccagagcttgaactagttccagacatatgagaaccaccagaacctgaactgataggggacttggctttagaggatggaggagttccaggaacaggcttcattggagaggcaagcttgtcagagcctccaggtggccttgaatgagaaggggatatgtttggtttacttaaagaaggattcataagtgatgatggctttccttgaggtttcatcttggtgctgctagagccactgctcagtccatgcttggttatgggagaggagcctggcttccccccagactgggatgaatttttggactggctagatccagaagacccctggctagaatacatactgctacttaacttggaacttgatgaaccttctgatttactgcttttcatcttccctgaggtggaagcagatgaggaagaggaggaagaatggctatggtggcttttgctgcctgaggaagacacagaaccactgctggtatactgactgtgagaggaaggcttgcccaccatcactgttcccttaggaatctgaatagtgattttgggaatgggtggtgtggcaacacctgggggagtctgagatcttcctgcactgcctggcgatttagatccacctgtactggtaggtggggtaaaaggtctgttagaagaactatgagatggagactttccctcagtgtctgccttcttccgctttggaggcttatctttgcttttcccatcattagaaggggtccgactgcgcttccctggtttgctgtctaatccgggccccgagagagtactattactggtgccattgccttcctttaccctcttttgagtcttttctttccctaagtccccagtggtcagtaaaggaccctgactaccactgtgatgctccataagatctgcaggagctaaagctttgccggctactgaaataatactgaaatcaactgtgtcggcttggttattgcccttaaacttggtctccccattatcacctccaagcattggcacccccaaagtatttagtgcctgagatgcaaatcctttgaaatcatcattatccccactttggctgctttcatcaaaatattcttctccaaaaccactttggctctggctgttcaataaatcaggattgaaatctactccatcatgaaaaaaatgattggtaggagagtcactactggggcttccagcagcatctgcaataagatcagctggatcagtgtatggattttcattattgttagtttgaaagacatcagagtcaaacagggtactctgagaatgcccagagcttgaagaatctcgaagaggggtgccaatggctgggcaatcatcactagtgctgggaagtttagaagcttcttctgcaatgtctgaaaggatgtcagttacatctgggccaatgctgtctgaactggatagtcggaccatcctttgaatactgggttgggggtgaggtactggttgtgggtaagttgttgggggagtgctacactggcttggagctggagtgatgtgtggcgtatccagcgtgtcagctgtcatgttgacatcaaagatagggttctgtgagtcaacatccattgaaaatagctccctctgaaagtcatcttcagtctggtgctttggtttctcaggtggtaatcttgatgacttctttttcttggtcttgttgctccccgagcatatttccatgcggggtgagccggaagaggagttctgcctttctaaagggctgcttccataaagggttgagaaatcctgggcaggattatctttaagaaggttcatgagcatcgggtggttcttggtgttgccggccatcgaagagacaggtggcggcgtgtgatgaggaggggtcggactcgagccaatggtagaccccccgttccctgtgatttgcaacaaactggtaagaattgggttctgagacaccttgctgaagtcctccccatggcccaccgactcatgccgatctttgatgctcatgctcatattaaacaaggtggtaatgggaccccccggaaaggtgttggttggtgtagtggtaccactcattgggttgttgcctgtggtcatgccataccctgggctgctagccgggggcaggttctttttcaccatgtcttcaactgtctctgcaatgagggacagtgctggggtgtcggcttgaatggtttcagctttcctccgaatagccctcatcgtcacagggatggacatacatctgcaaaataaagaagaaaacaaagttaacattgcaatagctgctgaatgagacctgagatttagatataacatcagagttttgcagtaagcagttttcaggtagggcaaataatctgtaagacaaaaatagttctatcaaataccagagctttgggtaaatacattctaaaaatctaacccaacataaaattgtcaacctcttatgaatcacacaacaaaagcaaactataaacaagagtccaaataattgaatttcaaacttaactaaaagaaaattggtaataatggaactcagtaagaaaatgcctccttaggggccgggcacagtggctcacgcctgtaatcccagcactttgggaggccaaggcggctggaacatgaggtcaggagatcgacaccatcctggccaacatggtgaaaccccgtctctactaaaaatacaaaaattagctgggcgtggtggcgcgtgcctgtaatcccagctactcgggaggttgaggcaggagaattgcttgaacaagggaggcggaggttgcattgcactgagatcacaccactgcactccagcttggcaacagagtgagactccgtctcaaaaaaaaaaatgcctccttaggtcgggcgcggtggctcactcctgcaatcccagcactttggaaggccgaggagggtggatcacttcgggtcaggagtttgagaccagcctggccagcggggtgaaaccctgtctctactaaaaatacaaaaaattagccagccgtggcggtgcacagctgtaatcccagctactcaggaagggtagacaggagaatcacttgaacccaggaggcagagatcgcagcgagccaagatcgtcccattgcacgccagccttggtgacagtgcaagacttcatttcaaaggaaaaaagaaaatgtcgtcctctggggggcttcatatggtaattacagggatacataatttattttaattaaggaaccattagaaaaatctccgccggtcagagtggctcacgcctgtaatcccagcactttgggaggccgaggcgggtggatcacagggtcaggagttttgagaccagcctggccaacatagtgaaaccccatctctactaaaaaaaagaaaaaatacaaaaaattagctgggcatggtggcaggtgcctgtaatcccaactacttgggaggctgaggcagaattgcttgaacccgggaagcagaggttgcagtgagctgagattgtgccatggcactccagcccaggtgacagtacaagactccatctcaaaaaaaaaaaaaagaaaagaaaaatctcttgacccattaagtactaaaccttaatgacttagatcatcccaaacctacactattataaaaagtgctatttctgttataaatcttgtttattttaaagcaaagcactttttattttccagataaatttatattcataaacctcagtttgcaaacgttttgctctagaacatatgtcagcaaatttttttttctttttttttttttttttgagacggagttttgctcttgttgcccaggctggagtgcaatggcgcgatcttggctcactgcaacctccacctcccaggttcaagtgattctcctgcctcagcctctcgagtagctgggattacagccatgcgccatcacgcccagctaattctgtatttttagtagagacagggtttctccatgtcagtcaggctggtctcgaactcctgacctcaggcgatccacccacctcccaaagtgctgggattataggcgtgagccaccacacccagccagcaaatttttctttttttttttttttttttctttgagacagagtctcgctctgttatccaggctggagtgcagtggcatgatcttggcttaccgcaacttccgcctcccaggttcaagcaattctctgcctcagcctcccaagtagctgggattacagaagcccgccaccacgcccagctaatttttgtatttttagtagagatggggtttcaccatcttggccaggctggtcttgaactcctgacctcgtgatttacccgcctcagcctcccaaagtgctaggattacaggggtgacccccgcacccggccgcaaatttttcttataaggccatatagtaatccgttaggctttgtaggtcttgtttcctgttcacctactctgcaatattaactagaaatctgccacagacatgtaaatgaacagcagtgttccaataaaatttatttacaaaaataggctgccagacccagctgtagaaaaatctcaaaaaattacatattaatggttctgggatgcatactggcttaactatcacgtaacaattaagttggctttttgtttgttttgagatggcatcttgctctgtctaccaggctggagtggagtggcacaatctcggctcactgcagcctccgcctcccaggttcaagcaattctcccgcctcagcctcctgagtagctgggattataggcacctgccaccacacctggctaatttttatatttttatttatttagttagtttgtttgttttgagacagaatctcactctatcacccaggctaaagaacagtggcgcaatcttggctcaccgcaacctccgattcccaggttcaagtgattctcctgcctcagcctctcaagtagctagaatgacagacggataccaccatgctcggttaattttcgtatttttatagagatgacatctcaacatgttggccaggctggtctcgaactcctgacctcaagtaatctgcccgccttggcctcccaaagtgctggattacaggcatgcactgccacgcccagcctaacatttaagttgtgaaatctgctcaggcagacacagtggctcacacctgcagtaccagctactcaggaggtctaggtggaaggataacctgaacctcggaggtcaacacttcagtgagccgtcatcacaccactgcactccagcctgggtaacagagtgagactcttgtctcaaaataaaaaaataaaagaataaaaagataaaaatgtcacatctatgaagaattggcacacaggataggtaagaaaaatatctgtattttattatggctttctcctgccttaaagtaccataattccaggcctgaagttacctactttacttcccattactctcatagtaatatcattaaaaaaaaaaaaaaaaaaaaaaaaacaaagctggctgtgtgcagtggctcacgcctgtaatcccagaactttgggaggccaaggcaggcagatcacctgaggtcaggagttcgagaccagcctggccaacatggtgaaaccccgtctctactaaaaatacaaaaatgagtcaggtgtggtagcacatgcctgtaatcctagctactcaggagggtgaggcaggagaatcacttgaacccgggaggcagaggttgcagtgagccaagattgtaccactgtacaatctgggcatcagagcaagactccatctcaaaaaaaaaaaacaaagcttagattactttgaatccgaaagcagagaagggtgaaatcaaagcaataactaaattgctcctttatttgaaattcatgctaattctgaaaacaacatttttttttttttttgagacagagtctcactctgttgcccaggctggagtacagtggcatgatctcggctcactgcaagctccacctcccgggatcatgccattctcctgcctcagcctccctagtagctgggactacaggcgcccgccaccatgccgggctaattttttgtatttttaatagagacggggtttcactgtgttagccaggatggtctcaatctcctgacctcgtgatccacccgccttcacctcccaaagtgctgggattacaggcgtgagccaccaggcccggccttttttttttttttttttttttttttttttttttttttttacaacaaaaacaaaaacacggagtcttgctctgtcgtcaggctggagtgcaatggcgcaatcttggctcactgcaacctccacctcccaggttcaagttattcttctgcatcagcctcccgagtagctggtactacatgtgcccgccatcgcgcctgactaatttttgtatttttagtagagatgggggttcaccatgttagccagaatggtctcaatcttctgacctcgtgatccgcctgcctcggcctcccaaagtgtggggattacaggcgtgagccaccgcgccctactcaacaacattctttatacatctctaaatgggactcagatgaaaaagggccaaggctacctttgaacaactttggcaatgaagtcatctgtgcagatcagtgcatccgacagccctttgtagagtttacagctcacatgtgttgagtcctgcacatccattaccactgaaagacaaaatacataggaaattgttttagatttagcttctgacttttccaaaaaagacatagggaccaaaccgctccatgagaggtgttagccacccacacaactcaccacacaccagggagtcattcacagggtgctgaaaagatacgctgaaacgagactctgagagaggacacacttcaaattggagaagcccaggagaatctaaaaggcaaagagaaagatcataaaacaaccaaatataagacttcacacaggctgggcacggtggctcacgcctgtaatcccagcagtttgggaggccaaggcaggtggattacctgaggtcaggagttcaagaccagcctggccaacatggcgaaaccccaactccactaaaaaataaaaaaaagaggccggatgcagtggctcaggcctgtaatcccagaactttgagaggctgaggtgggctcatcacctgaggtcaggagttcgagacaagcctgaccaacatggacaaaccccatctctactaaaaatacaaaatacaaaattagtcgggcgtggtggcacatgcctgtaatcccagctactcgggaggctgaggcaggagaatcacttgaacctaggaggcggaggttgtagtgagctgagatcgtgccactgcactccagcctgggcaagagtaagactccatctcaaaaaaaaaaaaaaaaaaaaaaaaaattagccgggtgtggtggcgcacacctgtaatcctagctactcagagggctgagacaggagaatcgtttcaacctgggaggcaagggttgcagtgagccgagatcatgtcactgaaccccagcctgggaaacagagcaacactctgtctcaaaaaaaaaaaaaaaagacttcacacaaataacattccttaaatgtacagactgaaattctctctccctccttggaaactaaatcgcacacttttttcacatacaaaacctactatatgtcatccacagatgacagaaggaatcagattccaaggaacctgccagtttgttataaatttctccagaacaaaagtagctagactttcaattttccaagatgaagaaacttaatccctaaaatgtaaaagtgaattctgaaaataaaagtggccgagtgtctcattctacttgataagcagatatccagaaccactgccataaactctgctttctatcaagtgtttgcagctgttagatgtgcagcccatagtttggcaagcagagatatagaggctataatctaaaataatgtatttattccacatatatctagccatcatcatatgttcttatgccagatgtgctagcagcctagacacaaggatcatatactttctttgtaaaaagcatgcctctctataggattagctccataactgccttatgaaaactcatttttaaatgccctaaagctatctggagacttcttaaggcattttaacacatgaaacagaagtgccacaactttgaacatatatgctctatgttattactccaactactaaaaatttctcatttctaaagcaatttttatttccatgagaagaatctcctggcccagcacagtggctcatgcctgtaatcccaacactttgggacactgaggtgggaggaatgcctgaggccaggagctcaagactatcctatacaacatggcaagacaccatctctacaaaaaaaatgttgctgtataaatatgtacactgaaataaaaagtataatataaatttctttaaaatttgactagatgtagaggtgcatgcctatagtccagcgacttgaggagcctgagggaagagtatcacttgagcccaggagtttgaggccaaagtgaactatgactgtaccactgctttccaatctcgataacagagcaagaccctgtatcaagaaaaaaaagtccaggcatggtggctcacgcatgtaatcccagcactttgggaggccgaggcaggcagaccactgaggtcacgagttcaaaaccagcctggccaactcgacgaaaccccgtctctggtaaaactacaaagattagcctggcatggtggtggatacttgtaatccgagctacttgggaggctgaagcaagagaattgcttgaacccaggaggcaaaggttgcagtgagtgaagatcacaccactgcactccagcctgggtgaccaagcaagactccgtctcaaaaaaaaaaacaaaaaggccaggcgtggtggctcatgcctgtaatcccagcactctgggaggctcaggcgggcagatcacgaggtcaggagatcgagaccatcctggccaacacggtgacaccccgtttctactaaaaatacaaaaaaattagccgggcgtgatggcgggtgcctgtagtcccagctactcgggaggctgaggcaggagaatgacgtgaactcaggaggcagagcttgcagtgagccgaaattgcgccactgcactccagcctgggcgacagagcgagactccgtctcaaaaaacaaacaaaaaataaataaataaaaataaaagagatctgatttgccttccctatttcttattgtctatcactggcactgacacatatctatcaacagagcgcttctgacttaagatttttaaaattaactatggttagctagaacagccaaaatttacagcaaagcttctaatagccaactgtctttgaaaatcatcagcatttacgccgggtgccatggctcacgcctgtaatcccagcactttgggaggcctaggagggtggatcacgaggtcaggagttcgagaccagcctggccatgatggtgaaaccccatctctactaaaaaaaatttaaacaattagccagaggctgacgcaggagaatcgcttgaacctgggaggcggaggttgcagtgggccaagatcatgccactgcactccagcctggggaacagagtgagactccgtctcaaaaaaaaaaaaaaaaaaaaaaaaattcatcagcattccagaatcctgagagaaaaaagagctaaaccttcttaaagctgtaagattaagttctccaaacaatggggagagaaaacatactcagaactaaacctgggaagcactctcctaacaacctaaaatttaacctaaaactggccaagcacggtggcacctattatcccagcaccttgggaggcctagtcaagaggatcgcttcagcccaggagttacagacgaacatgggcaacatagagagaccctgtctctacagaaaaaattagccaggcttggtggtacatgcctatagccccacctacttgggaggctaaggcaggaggatcgcttgagccaaggaggtagaggcagcagaaagctgttatcatgccactgtggttcagtctgggcaacagagtgagaccctgtctcaaaaaaaaaaaagcctctctcactacagcattccaagttctaccttatgtatatctgctacagggtacagcccctaaaatacccagttacattactatgttcagaaaaagagttaagaacattgcaaaaagcagtggtctccaaatgctagtctacagactggttccatcaaaatgatttgtggagtttagattcccaactcttcccactgagattatcattcagttcatcttcgtgtggaaacacagcatctgtgattttttttttttttttgagagggagtctcattctgtcacccacactggagtacagtggcatgatctaagctcagtgcaacctccgcctcctgggttcaagtgattctcctgcctaagactcccaagtagctgggactacaggtgtataccaccacacccagctaatttttgtatttttagtagagactgggtttcactagttggccaggatggtctcaatctcttgaccttgtgatctgcccacctcggcctcccaaagtgctgggattacaggcacaaaccactgcactcagcctggtgttttgtttttgattcagggtcttactgtgttacccaggttggagtgcagtggtgcaatctgagctcactgcaatctctgcctcccaggctcaagcgacaatcctcctgcctcaggatcccgagtagctgggaccacaggcgcacaccaccacaactggctacttttttctagagatggggttttgccatgttcctcagaccgatctcaaatcatgggctcaagtgatttgcccaccttggcctcccaaagtgctgggattacaggcgtgagccaccacacctggccatcatctgtagtgttaaaagctccacatgtttgaatttttttttttttttgagacagagtcttgctctgtcacccaggctggagtgcaatggcatgatctaagctcactgcaacccccgcctcccgggttcaagcgattctccttcctcagcctcccaagtaggtgggactacagtcgtgcaccaccacgtgcagctaatttgcttgatttttatgccaaatatgaaaaaaaaaaaactttttttaagttctacaggtgattctgatgggccaccaattaaagaaccactggagaagtaagtttccatcttccagtaagcatatcaaaggaaaggcagtaccttctttcagaatagttcttttgacacagcttccaatgagggtgttataggccacttggtgtctgatcagatttaggataagaggaactcggccagggtgctgaaaggtgattttgctaacaagggttccctgtagacttcggccatctggaagaggagcatccttgttgaggaaatagcagtgctgctgaccaggaagagcctgggcaaaaagaacagttaacgagtgctatttagttacctattgtattccaaccacaaagtatcctgaaaaaacctactactcaaaaaagtgcagaaaagtctccacagtgaatgttttcatcagctgatattataaatgtcaatcaattactaattaggctgaaaagatgtctttttagtaaatgcactatgctagtgatttcctaacctagctaacataaaaactacctcagaaatctgtattaaagaggttcctaaaccataaatgcaaaatctcttttttttttttttttttttgagacagagtctccctctgttgcccaggctggagtgcagtggtgcgatctcggctcactgcaagctccgcctcccgagttcatgccattctcctgcctcagcctcctgagtagctgcgactataggcacccgccaccacgcccggctaattttttttgtatttttagtagagacagtgtttcactgtgttagccaggattgtctccatctcctgacttcgtgatccacccacctgggcctcccaaagtgctgggattacaggaataaacaaccacgcccggctgcaaattctctatttttaataaaacacctatataataataatgcagccagaatttggtaaccactactttagtctattgtaaaagattcagataaatacaagtccagatgaggttttggaacgttcccttattattattattattacttttgagacagggtttcactcccattacccaggatggagtacaattgtgcaatcttggctcattgcaatctctacctcccaggatgaagcccctcagcttcccgagcagctgagactacaggcatgaacaaccacatgtgcctatttttttttttttttttttttgagacagagtcttgctcttgtagctcaggctggagtgcagtggcacgatctctgctcgctgcaagctccacctcccgggttcacgccattctcctgcctcagcctcccaagtagctgggactacaggcgcccgccaccacacccagctaattttttgtgttttttagtagtgacggggtttcaccatgttggccaggatggtctcgatctcctgacctcatgatctgcccgcctcggcctcccaaagtgctaggattacaggcgtgagccaccgctcccggccacatcagcctaatttttgtattttttttttgtagagacaggattttgccggaggatgaggcagaagaatcgcttgaacctgggaggcagaggttgcagtcagccgagatcgtgccactgcactccagcctgggcaccaagagcaaaaaaaaaaaaaagaaaaaagaaaagaaaaggacaggcaaggtggcttgcgcctgtaatcccagcactttgggaggcggagtagggtggatctcaaggtcaagagataaagaccaatctggccaacatggtaaaaccccgtctctactaaaaatacaaaaattatctgggcatggtggtgcacacctacagtcccagctactcaggaggctgaggcaggagaatcacttgaacctgggaggcggaggttgcagtgagccgagatcgcgccactgcactccagcctggcaacagagctagctagactccatctcaaaaaataaaaaaataaaaaagagaggattttgccacgttgcccaggctggtattgaactcctgagctcaagtgatctgccttgccttggcctcccaaagtgctgggattacaggtgtgagtcactgtgcccagcctcttaattactgcttccagcattttcctctctgtaagtactttcaggatctttccagattctaagctcatggcacttgaaagaattaaacagtaagaatttataacacctaattatgatattctaaaagttcaaaataccattaagagtctgtcaccccgccaggcaaggtggctcacgcctgcaatcctagcactttgggaggccgaggcgggcggatcacgaggtcaggagatcgagaccatcctggctaacatggtgaaatcccgtctctactaaaaatacaaaaaattagccaggcatggtggcaggcgcctgtagtcccagctactcaggaggctgaggcaggagaatggcatgaacccgggaggtggagtttgcagtgagctgagatctcaccactgcactccagcctgggcgacacagcaagactccgtctcaaaaaaaaaaaaaaaagtctatcacccaaaatttctttttcttttttatttttttgagacggagtcttgctctgttgccaggctgaagcgcagtggtgcgatcttggctcactgcaaccttcgtctcccgggttcaagcaattctcctgcctcagcctcccgagtagctgggactacaggtgcatgacaccacacccagctaatttttgtatttttttagtagagatggggtttcaccctgttggccaggatgctctcgatctcttgacctcgtgatccacctgcctcggcctcccaaagtgctgctgggattagacatgtgaaacaccacgcccagcctcgttttttttttttttttttttttttgagacggaatttcgctcttgttgcccaggctggagtgcagtggcgcaatcttggctcactgcaacctctgcctcccgggttaagtgattctcctgcctcagcctcccaagtagctgggattacaggcatgttccaccacacccagctaatttttatatttttagtagagacggggtttcaccatgttatccaggctggtctcaaactcctgatctctagtgaccacccgccttggcctcccaaattcctgggattacaggtgtgagccactgcacctggccaatcacccaaaatttcaacaaagaactgtacattgttgtttcctaatggaagctcatgcccttttacttcaatacatttccgagatttcttttttttttttttttttttgagacagagtctcgctctgtcacccaggctggagcacaatggcacaatcttgtctcactgcaacctctgcctcccagattcaagccattctcctccctcagcctcccgagtagctgggattacaggcacccgccaccacacacggctaattttttgtatttttagtagagacagggtttccctatgttggccaggctggtctcgaactcctgacctcacgatccgcctgccttggcctcctaaagtgcggggattacaggtgtgagccaccgcgcccagcccatttctgagatttctgtaatttcctgccttactaaagaaataggacatgatccagcagtcttgaagaaacttatctgacctcaataatgctataaaggaagattatgatcttgggtccaaacataacctacaacattctagctccctagggctttacttacagcataaaatctcatgttgtgattcaaaggtatggggtcagggtcctttgatagctcaaactgagtgatcagttcatacaggggtgcataagttggttgagtttcaaacaatggaattcctggaaaaacaagaatcaatataatgatcatgttaagatgaaaacactgacagctcagtttccccttgatatctacattcattcacccaaaagagtacttactaagcatttactagtacaaagcactataacatctttaccagtaatacttcaatgaggcatgtaagactgaaagacgtcatgataacctgactttgaagtttctttttcacatttataacaagtactagatcctgatgctcaaaactcacctgtgcagttctgcagtttctgaacaaatgctctagatactgggattggctggggaaatttcaagaagaaacaggcaggaagatcaacactgttggcactggtgattgaggagaaggaaggggtccttcaaaaaaaagagggtggaagggttggattctgacttgatataaaaatgaaaaacccaaacaccttttttttttttgagacagattttccctcttaatgcccaggctagagtgcaatggcgtgatcttggctcactgcaacctctgcctcccgggttcaagggattctcctatctcagcttcgtgagtagctgggactacaggtgcccgccaccacgcccggctaatttttgtattgttagtagagatggggtttcaccatgttggccaggctggtcttgaactcctgacctcaggtgttccacttgcctcagcctcccaaagtgctgggattacaggcgtgagccaccatgcctggccacaaacacctattcttaaacatgtatgtatcacacagacacataagtacaaactctcaaaagctcactctgtgaaacttcctacccccaattcccagacatgctattggttaacactgtagaatttaatcaaacatttatcctgaggcatgttctccagttattactccaatgtaactaatgaacgtaagataaaagggggcactcattaagccagaggaattagcacagttctcttctttccctttcagtgcagagaatgtgttctacgagccgactttggagaggaacactcagatatcaaacaaaagagaaaccaatgaatggataaaacaaaaggccaacctctagaaattcaagtggggtaacagccaggttaaaacttgttacatactgcgctttgagaaaaattgactttgctactctaaaattatatttaacttaccatttattgtcaactggatgtgaccccataattaatggtgcaattgggagtttgtacacagcagatgttccttcaattgtcactgatgcattcatgcccaaagatcgagaaactggggataggaaagaaaaagggtattcctcaaagtaatacaaatgatgggaatcacagtatgttttaagaggttaatttttgcaatatttgtcagctataatttatcagatgctgttattcccttatttatttatttatgtatttatttatttattttgagacagagtcttgctctgtcacccaggctggagtgcagtggcgcaatctcagctcactgcaagctccacctcctgggttcacaccattctcctgcctcagccacccaagtagctggaactacaggcgcccatcaccatgcccggctaattttttgtatttttagtagagatggggtttcaccatgttggtcaggatggtctcgatctcttgacttcatgatccgcccatcttggcctcccgaaggactaggattacaggtgggattacaggtgtgaatcactgcgcccagcctatttatttatttttttattggaggcagagtctcactctgtccagactggaatgcagtggtgtgatctcgactcactgcaatctccacctcccaggttcaagaaattttcatgcctcagcctcccacgtacatggcattacaggaatgcaccaccatgcctggctaatttttttgtatgttttgtagagatgggggtttcatcaggttggccaggctggtctcaaactcctggcctaaagttgatccacccatctcagcctcccacagtgctgaaattacaggcatgaaccaccaggcacggcctgtagttcctataaaacttagaaatcaggccaggtgtgatggctcatgcctgtaatcccagcactttgggaggctgaggcgggtggatcacaaggtcaggggttcaagaccagcctgcagaagacggtgaaaccgcatctctactaaaaacacaaaaattagccaggtgtggtgacaggcgcctgtaatcccagctactcaggaggctgaggcaggagaatcacttgaacctggggggcggaggttgcagtgagccgaaatcgcaccactgcactccagcctgggcgacagagtgagactctgtctggggaaaaaaaaaaaaaaaattagaaatcctggaagttacctttctaatcaaccaataatttttgtcagtaaataaaacacaagaaacaatgcagtccaaaaacatcatttttgaagggttcagtatcaatatttacttattttttcttcagaatgcatttaagtaggatcataataaaaggacaggctggtgcactggctcacacctgtaatcctagcactttgggaggccaaggcgggaggatggcttgagcccaggacttcgggggctgtagtgagctgtgatcaaatcactgtacgccagcctgggcaacacagtgagacctaccccgtcccccatgccaaattataataacaataaaggagcctgacgccaaggctcgcacctgtaatcctagcactttcggaggccaagacaggtggatcacttcaggtaaggagttcaagaccagcttggccaacatagtgaaaccccatctctactaaaaatacaagaattagccgggtgtggtggtgcatgcctgtagtcccagctacttgggaggctgaggcaggagaatcacttgaacccaggaggtgtaggttgcagtgagctgagatcgcactactgcactccagcctgggtgacagagtgagactccatcttaaataaataaataaacaaacaaacaaacaaacaataaagggatggagtcaatgagtgaagctacaaagggacctaaggaggtattagtccatttcacttttttttgagacagagttttgctcttgttgcccaggctggagtgcaatggcacaatctcggttcactgcaacctccgcctcccaggttcaagcgattctcctgcctcagcttcctgagtagctgggattacaagcatgggccatcacgcctggctaattttgtatttttagtagagacagggtttctccatgttggtcaggctggtctcgaactcctgacctcaggtgattcgcccacctcagcctcccaaagtgctgggattacaggcatgagccaccgcgcccggcagtctatctctctttatcttttcttgtatcaagggcaaacagaaaataatgtccattaccatagttctttaatttagaaaacttcactttttttttgatcagtaactcactacgttgcccaggctggagtaccatgactatttacatgcacgatcatggtatgctacagtctcaaactcctgggctcaagcaatcctcccgcccaaacctcccaagtagctaggactacaggcataaactaccaggcccatccttctacactttttaaacaatgagtaagctgattatctcaggtcagatcgtttatatctcttcttatgagttgctcatttacttatttattcaaaagtactttttttctttttttgagatggagtctcgctctgtcacccagactggagtgcagtgacgcaatcttgactcactgcaacctcctcctcccgggttcaagcaattctcttgccttagcctcctgagtagctgggattacaggcgcgtaccaccatgcttgggtaatttttgtatttttagtagagacagggtttcaccatgttggtcaggctggtctccaagtcctgacctcgtgatctgcccacctcagcctcccaaagtgctgggattacaggcgtgagccaccgtgcccagcccaaaagtacttattaagctcctattatgtatgtgtgtatatatgcatgtgtgtatatacatatgtatgtacttgtgaacacacatatacgtgtgtgaggtgttgtgtgtataaggtgcaaatggtaaggtcaacaaactcattagagaatagcaaaccagaaattaaaggcaagctgggcaccgaacaaaacctttaattcctttacaattaaagtcttaccattattctcatgcaaaatgatgggagatgcagtcttgtcatccagtaggtcagaaggagagacatagtacttcaggttcattaaatgacctataaaaaataaaactcataactgtatctttatcaggtaaattacaaacacagaaaaacattaacatttattatataaaccgatattcaagaaagtactttaacatatatgaagagtcatgctccaaaacagcttatgaaatatggcaggtgtggtgactcacacctgtaatcctggctctctgggaggctccggcaagaggatcacttgagtccaggagtttgagactagcatggtcaacacagtcagactccacctctaaaaataataataataggccgggcgcgatggctaatgcctgtaatcctagcactttgggaggtaaagatggtgaatcacctgaggagagaagttcaagaccagcctggccaacatggtgaaaccccatctctactaaaaatacaaaaaattggccaggtgcggtggctcatgcctgtaatcccacaactttgggaggccaaggcaggcggatcacaaggtcaggatattgagaccatcctgactaacatggtgaaaccccatcttgactaaaaatacaaaaaactagctgggcatggtggcacgcgcctgtagtcccagctatgcaggaggctgaggcagaagaatcgcttgaacccaggaagcggaggttacagtgagctgagatcatgccactgcactccagccctggcaacagagggagactccgtctcaaaaataataataataataattagcctggcatgctggtgagtgcccgtagtcccagctactcaggaagttaaggtgggaggtcaaggatacaatgagccgtgattgtgccactgcactccagcctggaaggcagagcaagaccccgtctcaaaaagtaaaaataaaaaataaagaaatatgacaggcgcttgggtgtggtggcacacacctgtaatcccagcactttgggaggccaaggtgggcagatcacgaggtcaggagatcaagacgagcctggccagcatggtgaaaccttgtatctactaaaaatacaaaaaattagccaggcatggtggctcgcacctgtagtcccaactactcgggaggctgtgacaggagaattgcttgaacccaggaggtggaggttgcagtgagctaaaatcgtgccactgcactccagcctgggtgacagagcaagactccatctcaaaaaaaaaagacatatgacagaagatgaagtatggattccgggactaacaatttatttcacacaattgatttaaaaaaaaaaaaaggccaggtgaactggctcacgcttataatcccaacactttgggaggctgaggctggaggatcacttgaagccaggagttcaagtctatagtgagttatgactgcaccactgcactctagcctaggcaacacagtgagacccccatctctaaaaaaattgttaaagttacccaggcatggtggcacttgactgaagtcctagctactcagggggctgaggtgggaagatcacttaagcccaagagttaagggctgaagtgagctatgtttctgccactgtacttcagccagagggacatagcaaggctctgtctcaaaaagataacaaacaaaaatggggaggacaggtattgacagcttagaaatcatcgcaaaaagcccaggcgcagtggctcacgcctataatcccagcactttgggaggccgagacaggcagctcacctagggtcaggagttcgagaccagcctggccaacatggtgaaaccctgtctctggtaaaaatacaaaaattagctgggcacggtggcacgtgcctgtaatcccagctacatgggaggctgaggcaagagaattgctggaacccaggatgcagaggttgcaatgagccaagatcgcgccactgcactccagcctgggagacagagcaagactctgcctaaatgcctaaaaaaaaaaaaaaaaaaaaaaaaaggaagaaatcatcacaaaatacacaaatatctggcaattttctccctctgcttatatgtttataaaccccaagatgaggccgggcgcagtggcttatgcttataatcccaaccctttgcaatgcagtggcaggaagatcacttgatcccagttcaagaccagcctaggcaacatagtaagaccatgtctctataaaacaacaaaaattagccaggcatggtatcctgtacctgtagtccaagctactcaggaaactgagttagggggattatttgggcccaggaggttgaggctggagtgagtcatgattgcacgactgcactccagcctgggcaacacagcaagaccctgtctcaaaaataaataaatagggattggtgcagtggctaatacctgtttgtaatcccagcactttgggcagccgaggagggaggatcacttgaagtcaggaatttgagaccagcctggccaacatggtgaaaccccatctctactaaaaatacaaaaattagtcgggtgtggtggcacatgcctgtaatcccagctactcgggaggctgaggcaggagaatcccttgaacccaggaggcagaggttacagtgatccaagattgtgccactgcactccagcctggtgagagcctgtctcaagaaaaataaacaaatacataagaataaaaattggccaggcgcagtggctcatgcctgtaatcccagcactttgggaggctgaggcgggcagatcacgaggtcaggagatcgagatcatcctggctaacgctgtgaaaccccgtctccactaaaaaatacaaaaaaattagccaggcgtggtggcgggcgcctgtagtcccagctaccctggaggctgaggcaggagaatggcgtgaacctgggaggcggagcttgcagtgagctgagatcgcgccactgtactccagcctgggcaacagagcaagactccgtcttaaaaaaaaaaaaaaaaaacagaataaaaattaacaaataaataggctgggcgcagtggctcatgcctgtaatcccagcactttgggagaccaaggtaggccgatcagtcgaggcgaggagttcaggaccagcctggccaaaacagtgaaaccctgtctctaccaacaatagaataaattagctggctattgtggtgcacacctgtaatcccagctactcaggaggctgaggcatgagattcacttgagcccaggaggtggaaggagcagtaagccgagatcatgccactgcactccagcctgggcaacaaagtgagactctgtctcaaaaaaataaacaaacaaactaaaggtgaaatgaaaagtaatgaccctcaacttaaattacacatgtttctaaacaagcaaaataggatcacgtacccccactccttggtgtgagatagccaacacttccatgaagaatcttatccaagggaccagcattagttgctttcctgtaagacaagtgatctatgtttgcttatatttaatccctgatggtcttggtacacactgtgatattgagttcacctctccgaagtcttgtctttttttttttttgagacggagtttcgctcttgtcgcccaggctgaagtgcagtggtacaatctcagctcaccgcaacctccgcttcccaggttccagtgattctcctgcctcagcctcccgagtagctgggattacaggcgcccgccaccacgcccagctaattttttgtatttttagtagagacggggtttcaccatattgggcaggctggtctcgaactcgtgacctcaggtgatccgcccgcctcggcctcccaaagtgctgggattacaggcgtgagccaccgcgcccagcccaaagtcttataatactatcataatggttctgtcttgtaattgggcatatagcaaatgtatttcacctccaaagtaaagggattatttccaagtacacaccagtatgtagtatggtgaacaaaaattacacttagactattatttctcagatgggactccaggtctgatgagtcttgagataaaacctatggtaaccaacaacttagcgatactgatactcagaagttcaaatacaatcatcattttggaagagaaaggacatattatcatacaggcttaatagagatgtataaaataggaccctaatctccccagagaaaaactcaagggatcatgtagaattaaggttttagcagtcttaccagtacataattgccattttagaaagatcttgttctaaggattggagagccaagtacattttagtcttcagtttgctggagagtagatgagaagaacatgagttaatagttgaaaaatatgaccaagcggggtggctcagcctgtaatcccagcaccttgggaggctgaggcgggcagatcacctgaggtcaggagtttgagaccggcctggccaacatggcaaaaccccatctctactaaaactacaaaaattagccgagcgtggtggcaggcacctgtaatcccagctgctcggaagggtgaggcaggagaattgcttgaacccgagaggaagaggttgcagtgagccaagatcataccactgcactccagcctgggtgacagaacaagattccatctcaaaaaaaaaaaaaaaaaaagttgaaaaatacacatatatacatacagacacaaacagtgacatagaaggcctaaagagcaagtctaaattgaaggcaaaaatatatatatatttttaaaaactggccaggcgcagtggctcatgcctataatcctagcaatttgggaagccgaggagggcagattgcctgagctcaggagtttgagaccagcctgggcaacacggtgaaaccccgtctctaataaaatacaaaaaaaaaaaattagccaggcgtggcagcatgcgcctgtagtcccagctacttgggagactaaggcaagagaattgcttgaacccgggaggtggaggttgcagtgaaccgagatcatgccattgcattccagcctggtggcagagcgagactctgtctccaaaaaaaaacaaaaaccaaaaaaaaaactggccaggcgcggtggctcacgcctgtaatcccaacactttgggaggccgaagcgggtagatcacgtgaggtcaggagtttgagaccagcctgaccaacatggtaaaaccctgtctctactagaaatacaaaaattagccaggtggctgggcgcaatgtctcacgcctataatccaagcactctgggaggccatggcgggtggatcaaggtcaggagttcgagaccagcctggccaagatggtgaaaccccacctctactaaaaatgcaaaacttagccaggtcagtggtgggcgcctttaatcccagctactcgggaggctgaggcaggagaatcgcttgaacccaggaggcggaggttgcagtgagccgagatggcaccactgtactgcagcctgggcgacagagcaagagtccatctcaaaaaaaattataataattagccgggcgtggtggcgcatagccgtaaacccagctactcggaaggctgaggcaggagaactgcttgaacccgggaggtggaggctgcagtgagctgaggtcatgccactgcactccagcctgggtgacagagcgacaatccgtatttaaaaaaaaagaaaaaaaaaaaacattttaaaacattaattcttgactggacctcaggtggtccacccacctcagcctcccaaagtggccaggattaaaggagtgagccactgtgcccagcctaaaacattaatttttaaaataaattttttttgttactatatatatatatatatatacacacatattttttctttttttttgagacagcatctcgctctgtcaaccaggctggagcacagtgacgcaatcactgctcactgcaccctcaaactactagtttgaagtgatcgtcccaccttagcctccgaagtagctgggactacatgcacccatcaccacccatctaagctgttgctgttgtctttctgctagagacagggtctcactatgttgcccaggctggtattgatctcctgagctcaagaaatcttcctgtcttggcctcccaatgtactgggattagaggcatgggccactttgactggcttcactactattaaagcctatttttagcacttcaaagcttatttttatctctgttttaaaaagccaaatacgttaatagaatcccaggtaggttaaaaatagaattaaagccagttccacagcaactaattcctttcagcctagaaattggaatgttggacatctcaaagattatattctgtcttccagcattatgatcgattaatgcaggtgctgcctattgaagatatctttgaaaggcccaatgttggaagctgagctacagattgcagtataagtagaaactaggagtgacaaacagcagaagaggtggcaaatttctaggcataaggtggcttatagatttatactgatttttacaaacaaaagcaaaaatattaaaaatacttacttgtcccctggaaggttatacagattaacaaggcccttaaggtgcttagaaaattcatcaaaatttttttccctataaggagttcagggaagaggggaaagagaggaaaataaaacataaaattactactcaatcttacaacaaagtgccaaaaatcacagctatataaaactgattttaataatcagctttaaccattttcctcaaaagttttctagcatcaatgtaaagcagcaaaagaaaagaaaatattttcctttgtctccctcctccattttttctggagaaggtgctaataagcagtgtgaaagttaaaaggaaggtgggcaaaatctctttaccaggtgttttattagctcccaagcaatgaaacctgatttaaatcaatcattaacaactttcctttcttttccctttttattaatttttttgtagagacggggtttcccgatgttgcccaggccagactctaactccaggacttcagcaatgctctcacttcaacctctcaccttcaacaacaggtgtgcaccaccacacccagctcctttcctccaaatatgtaactgaatttggatgtcaacaaaaataaaacttttgattgcagagataataagaagaaaataaattaggaagggccaggcacagtcctcgcgcctgtaatcccagcactttgggaggccaaggtgggtggatcatgaggttaggagatcgagaccatcctggctagcatggtgaaaccccatctctattaaaaatacaaaaaaaaattagccgagtgtggtggcgggcacctgtagtcccagctactcaggaggctgaggcaggagaacagcatgaaccaagaaggcggagcttgcagtgagccgagatcgcgccactgcactccagcctgggcaacagagcaagactgtgtgtcaaaaaaagaaaataaattgggaagacacaacacttgtgggtatacagcaacatgagagcaaagatgagagggaaaacaaatactaggacagagatggagacccagagaaaaggtagtgggtactctcgaggcaaaatacccattagaaaatattgctacgaccagatctaccctagaaaacataaactactaccgtgacctctggctttctaggacccaatattcaggcttcgattgtcggacaaatgggcttttgtggataggtttaggaatccaatacatctccacaattctaactcttgatatcttttttcaaacttgaaaaaaaaagctctctggaaagctaaactgccatgacaatgtcagacacttgagcagacattctgtgagcatttactgagcacttacagtcaacagtgctattaagacagcaaaaagaaacgagtagcagcaaaatatattctttaacttaatattaccatctatactaaatggtaatatcaggtaaaagtcaacattatttctttttttctccttttcttttttgagacagagtctcactctgtcgtccaggctggagtccgatggcgatggcacgatctcagctcactacaacttccacctcctgagttcacgcaattctccagcctcagcctcctgtgtagctggaattacagacgagcaccaccacacccggctaattttttgtatttttagtagacataaggtttcaccatgcctggatactacaaaaattagccgggcataatggcaggtacccataatcccagctactcaggaggctaaggcaggaaaatcgcttgaacccgggagggggaggttgcagtgagccgagattgcgccactgtactccagcctgagcaacagagtgacacaccatctcgaaaaaaaaggccgggtgcggtggctcacacctgtaatcccagcactttgggaggccgaggcgggcagatcacgaggtcaggagatcgaaaccatcctggctaacacgatgaaacctcgtctctactaaaaatacaaaaattatccgggcatggtggcaggtgcctgtagtcccagctactcgggaggctgaggcaggagaatggcatgaacccaggaggcggagcttgcagtgagcagagagcacaccactgcactccagcctgggcgacagagcaagactccaactcaaaaaaaagaaaaaaaaaaaaaaaaaagcttttgcacacacacatacacaacttatttcctcaatgtgaacactctaagacatcctcatgtggtgcctgagaacttcgcaatgctcaaaacaaagtgtatgtaataacttccttaaattccccaaaagtcttaactctgagtttaaatttaagtacagaaatttccactcaattaaaagaaaagtgaaaaaatccactatctgctaaaagcgactgtcttcaagcctagcacttttactgtaacacacatgtaccttctaaatgaaacaatttttcccaaaatcaaagcgaaaaagttattttcatggtatcatactcaattatcaagccttcactgattcaatgattaccttctatttattttgttccacacataattctttattatttttttttttgagacagtctcactccgtcacccaggctggaatgcagtgatgtgatcccagctcactgcaacctccacctcccaggctcaagccatcttgtgcctcagcctcctgagtagctgggattacacgtgtgagccactatgctcagctactttttttttttttttgagacagagttttgttcttgttgcccaggctggactgtaatggcatgatcttggctcaccacaacctctgcctcccgggttcaagcgattctcttgcctcagcctcccaagtagctgagattacaagcatgtgccaccacgcacggctaattttgtatttttagtagagacggggtttctccgtgttggtcaggctggtctcgaactcctgacttcaggtgatccgcctgcctcggcttcccaaagtgctgggattacaggcatgagccatcgcgcctggcctcacattcagcaatttttgtattttttgtagagacagggtttcgccaggctggctaggctggtcttgaactcttggcctcaagtgatctgctcacttcgacctcccaaattgttgggattataggcatgagccaccgcccccagctatatgaaattcctaaacctagatcaccaattcccaaccaggggtgattttgtgccccaggggacatggttgtaacaactaaggagatactactagcaactaatgaagaggccagggatgctattaaacataatagaatgcaccaggccacccgggagcaaagaattttccaatccaaattgtcattagtaccaagtttaagagaccctgggatatctttctgttgggaatctgaatcaaaataagaaaaaaaaaattaaaacttaaaaaaacaggggccgggcacagtggctcatgcctataatcccagcactttgggaggccaaggcaggaggatcacctgaggtcaggagtttgagatcagcctgggcaacacggtgaaaccccgtctctactgaaaatacaaaattagcagggcgtggtagcacatgcctgtaatcccagctactcgggaggctgaggcaggagaatcacttgaacccaggaggcagaggatgcggtgagccaagatcacaccattgcactccagcctgggcaacaaaagtaaatctccgtctcaccaaaaaaataaaaataaaaataaaaaaacagaaaaggggccaggtgctcagtgagccgagaccgcaccattatactccagactaggtaacaagaacaaaactccgtctcaaaaaaaaacagaaaagaaaagaaaagggtccagcatggtggctcacaactgtaatcccagcactttgggagatgtgaggtcaggagttcaagatcagcctggcccacatggcgaaacctcgtctctattttttttttttttctgagatggagtcttgctctgtcacccaggctggagtgcagtggcacgatctcagcacactacaacctccgcctcctgggttcaagcaattttctgcctcagcctcccgagtagctgggattacaggtacccaccaccatgcctggctaattttttttttttttttttttttttgagacggcgtcttgctctgtcgcccaggctggagtgcagtggcgagatctcagcttactgcaagctccgctcccaggttcacgccattctcctgcctcagcctccctagtagctggaaccacagatgcctgccaccacacccagttaattttttgtattttttctttttttagtagagatggggtttcaccgtgttagccaggatggtcttgatctcctgacctcatgatccacccgcctcagcctcccaaagtcctgggattacaggtgtcagcctaaattttatatttttaatagagatggggtttcaccatcttggccagtctggtcttgaactcctgacctcatggatccacctgcctcagcctcccaaagtgctgggattacaggcgtgagccaccgcacccagccacctagtctctattaaaaatacaaaaattagctgggcatggtggcacacacatgcagtcccagccgctctggaggctgaggcaggaaaatcgcttgaacccaggaggcagaggttgcagtgagctgagatcgcgccactgcactccagcctgggcaatagagcaagactccatctcaaaacaaaaacgaaaacaaaaaaaccctgggatagagtagggtgaaaagctatgctatgtcaattcaggacgtgattaagtatagactcttaaaaatctttgcccaagaaaataaacttgttcctgaggagaataacttctgaccagtcttaaaagccagctgtaaagaacagcactgtctgtcaatatcaaggaatataaatcgtatttgctcaccttagctgctgtacaagctccggacagctctgaaatcaaagaaaattatgttaaaacattaaaactactttagcaactttgaagatatcaaaagcctttctctttttctatagcacatgttttacaacaaaaccattaaaactacagatggtcctcatattaaaatattaaaaagcatcttcttcctacttggtgaaccacaggattagggtgagaaatttaaagtcaaagcatatgaaatagtttttaaaagaatctactttcagtagcttgtttaaaacattaggaactctaatgccatacatggaattcatatcaaattatctggttacacagattttacattcatctctattacataatttttcagatcatctgttcttgattataatctctttgaaggtagtaaccctgagtcatttatttctgtatccccagcacctattgttcaatcgtggctcatgtttgttgatatgaaatgaaaagggttcctgccggtgcagtggcttatgcctgtaatcccaacactttgggaggctgaggcaggtggatcacttgaggtcaggagctggagaccagcctggccaacatagggaaaccccgtctctactaaaaatacaaaaattagccaggcatggtggcacacacctgtaatcccagctacttgggaggctgaggcaggagaattgcttgaatccaggaggcagagattacagtgagccaagatcatgccactgcactccaggcgacagaacgagactctgtcccagggaaaaaaaaaaagaaaaagaaggaaagaaggaaagaaagaaagaaagaaagaaggaaggaaggaaggaaggaaggaaggaaggaaagaaagaaagaaagagagaaagagaaagaaagaaaagaaagaaaagaaaaagaaagcaagcaagcaagcaagaaagaaagaaagaaaaaagaaagaaaagaaagaaaggaaggaaggaaggaaggaaagggaaaagggttcctatggtgtttccacttgttaaagcctttggatgatgtcagagatgggacccatattttctaaatcccattctatagctgttgattttgtagcccatcacatcatctctacagtggctcatggaaaaacctaaacccaagctatttaaaccccaacaattaattttaaaattaatgtccctaagtaaaccccacagattccagtgaaatatcaacaacacataccacaggattctccccatggtgagccacttttacatcacaaagctgtcctgcaggatctaactgcacttccacatagaacatatctgacgtgatgtaacattcagtgccactggcactgagatgagagcccagtctagcaggaacaaatcaaaacaaaaattaatagaagacacataaataaagccacccaaagttaacactaagttaaacatttctgcctacagaaagactacttacccattctgtcttgctatggactccaaacgatcagtcattgctggtaaagatgttactataaaaggatgaaaaaaggagtcacaaagaatgctccaaatgacttaaatgatattcttttaagacagaaagattcatccttccaaaaccgtaaacatattcagtagttcaaatgcttgtaatttacataaagttcactgattagggttagctgtggcctatgcagtactaaaggtcaaaaaaaaaagatctatttgaaaaattaccgaacctttctcctctcctgttttcattactccttatgtgggacaaactgcctttaacttaagacacatttatctgctaatgatagaataaggaagattaacattaaaactaacattaaaaaaaactcaacattaacaacaccattaatcacaacagtcaaaaggttaaaacaatccaagtgtccactagcagatgaatggataaatgaaatgtatatacataaagaggagtatttttcaaccttaaaaaagaaagaaattctaataaatgcttcaaaatagatgaaccttgaagacattacgtttagtgaaataagccagtcacaaaaggacaaatatatgattccacttatatcaggtatacagagtagtcaaattcataaagacaggaagcagaatggtggctgccagggactgggggaaggcgggaatgggacattacagaatgtaagcttgggaagatgagtgaagttttacagatggacagtggtgatgattatacaataatatgaatgtacttaacgctactgaactatacacttagaaacaaagaaaatggtaaattttgttacctatattttaccacaattaaaacagaaaaaaaggcctcgtgcggtggctgacgcctgtaatcctaacactttcggagaccgaggcatgcggatcacaaggtcaggggttcaagaccagcctgaccaacgtggtgaaaccctgtctctaataaaaatacaaaaattagccaggtgtggtggtgcgcgcctataatcccaccctctcgggaggctgaggcaagagaatctcttgaacccggtgggggcgcagtggttgcagtgagcagagatcgtgccactgcactccagcctgggtgacacagcgacactctgtctcaaagaaaaagaaaacaaaaaaaggtaaagaagataatactcagctgagactgggcaaagtggctcacgcctgtaatcccaacactttgggaggccaaggcaggcagatcacctgaggtcaggagtccaagaccaccctggccaacatggtgaaaccccatctctactaaaaatccaaaaattagctgagcatggtaatgggcgcctgtaatcccagttactcaggaggctgaggcagaacaatcacttgaatccgggaaacggaggttgcagtgagcagagatcgtgccactgcactccagcctggacgacagagtgagacactgtctccagaaaaaaaaaaaaaaaccctcagctgaattaggttcatttctggtggatcacagtaaaatctgtttttactttcattattccccaaaaatagaattagtcattataagcatgaataatcaagctcatgacttatattttacatttgctttcctggaaatttgctccataaacaccgtaaaaatctttttagagttaaaatgtccatcttctggacaggcatggtagctcacgcctgtaatcccagcaatttgggaggccgaggcgggtggatcacgaggtcaggagatctatactatcctggctaacacggtgaaaccccatctctactaaaaatacaaaacattagccaggcgtggtgggacgcgcctgtagtcccagctgcttgggaggctgagccaggagaatcgcttgaacccaggaggtggaggttgcagtgagccaagattgtgccactgcactccagcctgggtgacagagtgagacaccgtctcggaaaaaaaaaaaaaaaaaaaaaaacttcgcgagttgctgtggctcgcgcctgtgatcccagaactttgggaggccaaggtgggcagatcacctgaggtcaagagatcgagaccagcctgaccaacatggaaaaccctgtctctactaaaaatataaaattacccgggcatggtggcacatgcctgtaatcccagctacttgggaggctgaggcaggagaatcgcttgaacccaggaggcagaggttgtggtgagccgagattccaccactgcactccagccagagcaacaagagtgaaactccatctcaaaaaaaaaaaaaaaaaaaaaaaaagtccatcttcttatcgagattaatcagaaataaatgtgaagggaaaaaaaacttttcccaggtatcttttttttttttttttttttttttgagacaagtcttgccctgttgcccaggctggagtgtaatggcgtgattttggctcactgcaacctccgcctccccaggtcacactgttctcctgcctcagcctcccgagaagctgggattataggtgcccgccaccacgtccagctaatttttgtatttttagtagagacagggtttcaccatgttggccaggctggtctcaaactcctgaccttgtgatccgcccacctcagcctcccaaagtgctgggattacaggagcgagccaccgcacccagcctccccaggtatcttatattacccttcatcatttatcttttaaatctctatcagcctccaaaacaggatcaaaaataaatgtttcaaactttagcaaaaagatcattccaactccataaatgaatgcaagagcaatatctaatacataaagttgacctacctcaattttttacttctagtttaagtataaaatggtccttcttgaactgggggttttgtgaaatcagcatatttcaaaagtgttcacaaacctttgagagccttctgcaatgtctccaaacagctgaccaaatgttgatgccctccagaactcatcacaaccctcttctcctgtgtcaagtgggaaaacatttgaggtgaaaattaaccaggccaacagtgttttaggtaaacatacacattatcctagtagtaatattgcaggacagtctatagactcaatatagtctatagattttgtagactatatagagtaacactggtctacaagtgttactctgtccatccatgcaaaatccatatatatgagtgtagaaaaaggtattcctcagccaggcacgtggctcatgcctgtaattctagcacactgagaggccaaagctgaataatcacttgagtccaggagttcgagaccagccaaggcaagatagagagatcctgtttctatttagtcaaaaacaaaaaagaaaacgttgtatttccacatctaaaacaaaaaaacctttagagaaatattaggaagaatcaaaatgtaatacatgagatctgccgcctgtggaagtgaccacatgctaagatataaacagttaaataagatggctcaggagatttggtagtgtacaaatttaacaaggtgatttgcatgtaatctgagaaacacaaccaaattttaagaaaatgagattgactctaaaaaacagaacatataggctgggtgcggtggctcacacctgtaatcccagcactttgggaggtcaaggcgggtggatcacgaggtcaagagactgagaccatcctggccaaaatggtgaaaccccgtctctactaaaaatacaaaaattatctgggcgtggtggtgcacgcctatagtcccagctactcagcaggctgaggcaggagaatcacttgaacccaggaggcggaggttgcagtgagccgagatcacaccactgcactccagcctggcgacagagagagactctgtctcaaaaaaaaaaagaaaaagaaaagaaacagaacatgtagtccagaaaagggacttccaaagaacaaaaacttagcctagtttgaggccggttgcagtggctcacgcctgtaatcccagcactttgggaggccaaggcgagcagatcatgaggtcaggagttcgagaccagcctggccaacatagtgaaaccccatctctactaaaaatacaaaaattagccaggtgtggtggtacgcgcctgtagtcccagctactcaggaggctgaggcaggagaatcgcttgacccggggatgcagaggttgcagtgagccaagaccacaccattgcactccaaccttggtgacagagtgagactccatctcaaacaaaacaaaacaaacaaacaaacaaaaaaaaacttagcctagttttcctaaccctatccagtgaagaagtttctctctgaaaaacattccagtccctaaaaacgtgaacagttttctggtataaggatagttttccaggcttttccatgttgcaaataaatctatctcactgctctaattctcccttacaaaacaaagtaatttattaataatctgaaatctcttgattcttgacaggagaagaggtgctctggtcaatgaataccagtattatgaaaactggaaaactaaatgttttgtcataaattaataaataagcatacagtatgtcagttgttgaaaactctttttttttttttgagatggagtctcgctccgatgcccagactggagtgcagtagcatgatcttggctcactgcaacctccacctcccgggttcaagcggttctgctgtctcagcctcccgagtagctgggactacaggcgcctgccactatgcccagctaattttgtctttttagtagagacagggttttaccttgttggtcagcctggtctcgaactcctgacctcaggtgatcgacccgcctcagcctcccaaagtgctgggattacagatgtgaaccaccacgcccagccatgaaaactctataaaatcttgatgtaccaataaaattaggtttctgaatctgcaaaactgaaaagtagacaagcaaagtcatggtgaccaaaccaagagagtggtacccaaagagagggccttattagccacctggaatccttctatctcacaatgtctctctaatgacagtatcatttacagaacatatttcaagctagaatttggttgccttaaggaataaaaatgacaacctgggccaggcacaggggctcacacccgtaatcacagcactttgggaggctgaggcaggtggatcacaaggtcaggagttcaagaccagcctggctaacatggtgaaaccccatctctactaaaaatacaaaaattaactgggcatggtggcggatgcctgtaataccagctactcaggaggctggggcaggagaatcgcttgaacccaggaggcggaggatgcagtgagccaagatcccaccactgcactccagcctaggtgacagacagagattccatctttaaaaaaaaaaaaaaaaaatgaatccgccaggcacggtggctcacactgtaatcctaacactttgggaggccaaagtgggtggatcacttgagcccacaagtttgagaccagcctgagccacagagtaaaaacctatttctggctaagcgcagtggctacgcctgtaatcccagcactttgagaggccgagacgggtggatcacgaggtcaggagatcgagaccatcctggctaacacggtgaaaccccgtctctactaaaaatacaaaaagttagccgggaatagtggcaggggcctgtagtcccagctactcgggaggctgaggcaggagaacggcatgaacccgggaggcaaagcttgcagtgagccgagatcgcaccactgcactccagcctgggtgacaaagcgacactccatctcaaaaaaaaaaaaaaaaaaacgatttctacaaaaaatataaaaaactagctgggcagccgggcacagtggctcacgcctgtaatcccagcactttgggaggcagatcacgaggtcaggagatggagaccatcctgaccaacatggtgaaaccccatctctactaaaatacaaaaaattagccaggcgtggtggcgtgtgcctgtagtcccggctactcgggaggctgacgcaggggaatctcttgaacctaagaggcagaggttgcagtgagccgagatcgcaccattgcactccagcctggccacagagcaagactccatctcaaagaaaaaaaaaaaaaaactagctggacatggttacatgcacctgttgttccagatactaggaggctgaggtgggagaaccacctgagcctgggaagttgaagctgcagtgagccatgatcgcgccactgcacttgagcctggatgataagacctggtctcaaaaaaaagaatgaatcaaaaattctactagtacaggctgggcatacctaatctgaaaatcaaaaatctgaaatgctcccaaatccaaaacctttttagcattcccaatgatgccaccaaggatttcacacctgacctcacataacagggtcatagtcaaaatgcagtcaaaacggctggacgcggtggctcacgcctgtaatcccagcactttgggaggcgaaggcaggtggatcacctgaggtctggaggtcaagaccagcctgaccaacatggagaaaccccgtctctacaaataatataaaaattagctgggcgtggtggcgcatgcctgtaatcccagctattcgggaggctgaggcagaagaatcacttgaacctgggaggcagaggttgcagtgagccgagatcgggctattacaacccagcctgggcaacaagagtgaaactccgtctcaataaaaaaaaaaaacaaaaaaaaacttagtttcacacacaaaagtattaaatatattattaaatatgttgtataaaattaccttcaggctatatctataaggtgtttatgaaacataaataaattatgtgtttagacttgggtcccatccccaagatatctcattatatatttgcaaatattccaaaatccaaaacaatccaaaatctaaaacacttccggtcccaagcatttcatataagggatattcaacctgtagtatagatacaatagactcctaaagttgaaaccaccatgtattcagatgttttatgaagatagtatgaacacatctacatggggagcttagcgtattaagaataattatctaagcaaaacactttacccacttcaccacaatccttaccatgacttgacgcacaagcttaatggtttcactccagggtctattttggttaaattttgcatggagccgttccaggagagaactcatcttactcagcttttctgactctatgatttaaatcagaaaacgttatcagtaactgttctatcaagaccatccacagttttccttgcaaaataaattcccacacttcatcacagtaagaattcagttaaaatattttccaaaatcattttacttcaaaacatccaaagaagacatttttaatggcaagatgacacacaagttatgggtctgatgtaaggaataccataccactggactgttatctatccacctttttttttttttttttaaagactaagtttcactcttgatgaccaggctggagtgtcaaaccctgtctctaccgaaaatacaaaattagccagatgtggtggtgcatgcctgtaatcccagctacttgggaggctaagggaggagaattgcttgaatccaggaggcagaggttgcagtgagccgagatcacactattgcactccagcatgggcaacagagcgaaacactgtctcaaaaaaaaaaagaaagaaaaaaattagccaagcctcctggcatgtgcctgtagtcagtccccagctactctggaggctgaggcagaaggatcacctcagcctgggaggtcgaagcttcagtgatgagccttgatcacaccacttactccatcctaggcaacagagggagacattgtgtcaaaaaaaaaaaaaaaaaagttattgaactgggctagagaggaaaatttaaaaaaaagaaaaaaaataaatgaaaatgctggctgggcggagtggctcacgcctgtaatcccagcactttgggaggccaaggcgggtggatcacctgaggttgggaattcgagaccagcctgaccaacacggagaaaccccatctctactaaaaatacaaaattagccgggcttggtggtacatgcctgtaatcccagctactcggaaggctgaggcaggagaatcacttgaacccaggaggcggaggttgcagtgagcccagattgcgccactgcactccaacctgggcaacaagagcaaaactctgtctcaaataaataaataaataaatgaaaatgctaaaaagacagcaatgaacaaactagacaaaaactcctacttcatgaagtttccatttttacacttgttgtctccttgcacccaaggagtacatctttcttttcttttttttttttaagacagagtatcactctgtagccccagcttgagtgcactggcacaatcaaggcctattgcagcctcaacctcccatgctccaggatcaagtgatcctcccagctcagccttcagagtagctgagactatagctaattttcccttgaaacagggtctcgctctgtcgcccaggttacagtgcagtggcatgattctggctcactggagccttgacctacaggattcaggtaatcctcccacctcagcctcccaagtagctgggactactggcttgtgccaccatgcctagctaatttttgtatctgttgtagagacaggcttttgccaggttgtctaggctggtctccaacttgtgggctcaagtgattcgcccgcttcggcctcccaaggtgctgggattacagccttgagccactacctggagctaattttttattttatttattttcaattttttttctttttttttttttttgagacggagttttgctcttgttgcccagactggagtccagtggcactatcttggctcactgcaacctccacctcccgggtttgggtgattctcctgcctcagcctaccaagtagctgggattgcaggcatgccactgtgcctggctaattttgtatttttagtagagaaagggtttcaccatgttagccagtctggtcttgaactcctaacctcaggtgatccgcccacctcagcctcccaaagtgctgggattacaggagtgagccaccacacccggccttttttttttttttttttttttgagacgaagtttcgctcttgtagcccaggtaggaatgcaatggcgcagtcttggctcaccacaacctccacctcctgggttgaagcaatcctcccacctcagcctcccaggtagctgggattacaggcattcaccaccacgcccggctaattttgtatttctagtagagacgggttttctccatgttggtcaggctggtctcgatctcccaacctcaggtgatccacccgcctcaacctcccaaagtgctgggattacacgcgtgagccacagtgcccggcaatttttttattttttttgtagagacagggcctcagtatgttgcccaggctggtcgcgaactcctgggctccagggatcctccagccgcagcctcccaaagcgctgggattacaggtgtgagtcactgctcccggcctcacctttcgacctctgctccaaaacacactctttgtttttcttgagaaacctgctgataaatatctgtacttcgatgctccaacactttttgagcgactattacgtgccagaaactatacaaaaataatcaggcaaggactctaatctgcaaagctcagaggaaactggagaagataaacaataacacagttcactgtatcaacagaactatgcccaaaatgctaaggcagcatcttagccggagtgtggaactttagaaaatcttagtaaagttccacagaaaagttgtttttctgcagttcgtagttcggtcaataaaagaacgaaattcagcgcactttaaaaatacacaatggcacaggatctgaacacttgacattgtagagaactgctggctgctaataaatataaggacctaatcatttcattgatgccaaaatagtctccagtacgtttacacacagccctaaatttattcaggcgtctcttctggaacgagatgtaagctgattttgtattcatttgccccgtctcccaccactttaggccaaaagtgccctagtcgagcatgaaatcttcacagaagttgagagtccccatcgccctaaagtcgaagctctataatcaccaaggagggtatagtgacaatctaaaactaatacacattccctctcctggactctatgcccctaaagtggcccccatgggacatctgcaagaacctcctctcacaaactggctcccccagttgtgtcccgccccctcctttcccctacagtcacttaccctcggtttccccctgagctttcatcctgaaggcgaggagaagctagatccgccacaaaaggataagcccttccccaccactaacggaggaaacaagttggctcgggatcccgggacgcagggcaccagcagtccctactcttcccgggaaggatcaatctgaagtccccggcggcaagaagagaagggtgctcgaggccgccgccatcttccccaacggaacttcccaaaattcgcgagataaaccgtggtcctgccagagagaggaagaggacagggcatcgaaatctcgcgaatattggtcaatgcgtcggcctcgcgagatttctttcagcgcagtcttccctttgatctgagctgtctcaggcctcgcgccgctggatattaaacctgccggccggtagctttcggctcccctgcggaaaccgccattttttttttattttagcagttaaacagctcgcaaattaaaatctccagatccctgtactgaaagactagcttttcttttttttttaatttttttttttttttttttgagatggagtcttgctcttgtcgcccaggctggagtgcaatggcacgatgtcggctcactgcaacctccgcctcccgggttcaagcgattctcctgcctcagcctcccgagtagctgggattacaggcacccgccaccacgcccagctatttttagtagagacggggtttcgccgtgttggccaggctggtctcgaactcctgacctcgctgtccgcccgcctcggcctcccaaagtgctgggattacaggcatgagccaccacacccggccatgactagattttcaaaggctattggtatcaggagtgtcttatgaaagataagtttaacctgagatactagatgcaataattacatcctaagaaagatagtggcgcattgtaacatgacgttcaaagcgagcctatagcacagttaattccccttttctcatttttttagtttcaaaactatttctggctaggcgcagtggctcatgcctgtaatcccagcactttgggaggccaaggtaggtggatcatcaggtcaggagtttgagaccagcctggctaacatggtaaaactccgtctctacgaaaaatacaaaaattagccaggtgtggtggtgcgctcctgtaatcccagctactcgggaggctgaagcaggagaatctctggaacccgtgaagcgaaagttgcagtgagcagagatcgcgtcactgcactccaacctgggtgacagagtgagactgtctcaaaaagaaaaaactgtatcctttactatcctcaaactaagtgttcttcacttagtaagcatctgtggagtcctaatatgtgtatatttggagctgctaatacaaacatgaaaacacggctggtcgcggagctactcaggaggctgaagcaggagaagcgcttgaacctgggaggcagaggttgcagtgagccgagatcatgctactgcactccagcctgggtggcagagcaagactctgtctcagacaaataaacaaacatgaaaacacaaccctagcgcttgataggctaatcttatttagagttccgaaaatatgattggtcactataatcataggggctcaaaattttttcattaattattatgccctaagtaccaatgccagatacccaactacactttatcatggaaactctatacaaataaaaaaaaaagtctgtactaagtgttgctaggaaatttttaactttataaagcttataaataaactttactaacttctggttacagaatggaatgagaagttatcatttgtcatctgaaaatgcagatgagagacaccattggaaaagttctactctagaagataagagagcaatgtcctttgggaggctgaggcaggtacttgagatcaggaggtcgagaccagcctggccaaaatggtgaaaccccatttctactaaaaatacaaaaaattagccgggtgtggtgacacatgcctgtaatcccagctactggggaggctgaggcaggagaatcgcttcaatccgggaagtggaggttgcagtgagccaagatcgtgtcatcgcactccagtctgggcaataagagcaagacggagtctgaaaaaaaaaaagaaagccatgtcattaaacaagaaaagtattcaaggtacatataggaacagtatacataggaaaatgggtacaatgggcaaattgtaagtgactaagctttgaaggaggcgccaaaggactctttttttttttttttttttttttttttttttgagacagtgtctcgctctgtcgccaaggctggagtgcagtggcacaatctcggctcactgcaacccccgcctcctgggttcaagcaattcttctgcctcagcctcccaagtagctgggactacaggtgtatgccacaccacccagctaatttttttgtattttagtagagacagagtttcactatgttgcccaggctggtctcgaacttgagctcaggcaatccacccacgttggcctcccaaagtgttacgattacaggcatgagccactgtgcccggcccagaggactctaaacctaaaatctaaactaacaaattggtttgttggggaaaaagagctattgaaactttagttaaatatttcttcttgtgtacagcctaaatggaaactttctgacttgttttagtagatttgcaggctaagtattgccatcacctgactgatcacttggggttcacagagttgccctgactctctgcccttgaaggttatgcaaataaagcaaatggagcagtcctggaatttctgagttcaaagtttttctgtataatgaagcaacccttattttacaaaagcacagattggatcaatacctgcagtttacagtagatattgtattttaaaatttagatacagcctgagattttctgctgcagaattttattcaccaaaaagaggaataccatgttagggagattatctaaaagaaagagagagagagaaagaaaggaaaagaaggaaggaagggagggagggaggaaggaagggtagttcaatacaaagtactggtttagtatgtagaagtgaggtgtcccggctccaggcactttctacacttaagtgtcaacatggtccaatctaactccttctcagtgtcagtttaacctatattagatgtcgataataagtggctcacgcctataatcccagccctttgggaggctgaggtgggtggatcacttaaggtcaggagttcgagaacagcctagccaacatggccaaagtctgtctctactaataatacaaaatacaaaataatacaaaaaaattagccgggcatggtggcgcatgcctgtaatcccagctatttgggaggctgaggcaggagaattgcttgaacctgggaggtggaggttgcagtgagccaagatcctgccagtgcactccagcctaggccacagattgaaactgttctcaataagcataataataataataggcctggtgcggtgtggtggctcatgcctgtaatcgtgccactgcactccagcctgggcgacagagggagacttagtctcaaaaaaaaaaataaaaatagtaataaaaataacataatttcattagtttatttattcaattgaaatttattgacgggattaaaagagttccgtgaaaaattttaaagtgctatagaaattcaagatattataagttcaaagtttcagggataaagcttcattctttcattagttactggtctctaattggcttcaagaggcagtaacagataattttgaaaggttcagccaggtgcagtggctcacgcctgtaatacaaacactttgggaggccggggcgagcagatcacgaggtcaggagatcaagaccatcctggccaacacagtgaaacccggtctctactacaaatacaaaaaattagccgggcatggtggcaggcacccgtaatcccagccatttgggaggctgagataggagaatggtgtgaatccgggaggcggagcttgcagtgagccgagatcgaggcgaagcttgcagcgagacgagatcgcaccactgcactccaacctaggtgacagagtgagactccgtctcaaaaaaagaaaaaaagtttctgctggtgtttaatctggataatcaatttaattcttccagattttgacacatcaccgatgccttctgtcgtcttcacttttccattctactgtgggtacatcgtgaattaaaaacttgatctcagccaggcacagtggcttgcacctgtaatcccagcactttgtgaggccaaggcggggggtgatcacaaggtcaggagttcaagaccagcctggccaagatggtgaaaccacgtctctattaaaaattaaaaaaaaatcatctgaacatggtggcaggcgcctgtaatcccagctactgagaaggctgaggcagagaattgcttgaacctgggaggcggaggttgcagtgagccgagatgaagccattgcactccagcctaggcaacagagggagactccatcccaaaaaaaaggccaggcatggtggctcacacctgtaatcccagccctttgggaggccaaggcgggtggatcatgaggtcaggagttcaagaccagcctgatcaacatggtgaaaccccgtctctactaaacatacaaaaattagccaggcatggtggcgtgtgcctgtaatcccagctactaagaaggctgaggcaggaggatcgcttgaatcagagaggcagaggttgcagtgagccaagatagtgccaccgcactccagcctggcaacggagcaagactccatctcaaaaaaagaaattaaaaataaaaacctgatctcatttaaaagacagaaaaatcagggtgaattttattgaactcatgacaacaaacccatgccaacacttactatggctgactggtcactacatttaatcagcccaggaagtctcatgccatctgtcatcatgtaaaacattcaaggccagacacagtggcccatgcctgtattccgagcatcttgggagtccaggtgggaggatcccttgagccgaggacttcaagagcagcctgggcaacatagcaagaccccgtctttacaaaaaataaaaaaaaaattagccaggctctgtggcttacacctgtaatcccagccaggagaggctgaggctggaggattgcttgagctcaggaagtgaagatggcagtgtgtcagccggacacagtggttcacacctgtaatcccagccctttgggaggccaaggtgggtggatcacctgaggtcaggagttcgagaccagcctagccacatggcgaaaccccatctctactaaaaatacaaaaatgagccgggcatggtggcaggcgcctgtaatcccagctactcaggaggctgaggcaggagaatcacttgaacccaggaggtggagcttgcactgagccgagatcgtgccattgcactccagcctgggggacaagagcgagacttcatctcaaaaaaaaaaaaaaaaagactgcagtgtgtcatggtcataccactgtactccagcctgggcaacagagcaagaccttgtctcaagaaaataaatccaggttgtcctggcaacactgtactccagcctgggcagcacagcaagaccttgtctcaagaaaatatatccagggtgtcctatcctcctatagcggtgaataaggagtgttcacaactgagttccagtacttgtgtttttcttttcttttcttttttttttttttttttggagacagtttcactcttgttgcccaggctgagtgcaatggcaccatctcatctcaccgcaacctccacctcccgggttcaagcaattctcctgcctcagcctccctagtagctgagattacaggcatgtgccaccacgctgggctaatttttgtatttttagtagagacggggtttcttcttgttggtcaggctggtcttgaactcctgacctcaggtgatctgcttgcctcggcctcccaaagtactgggattacaggcgtgagcctccatgcctggcccgtgtttttcttttttcttttcttttttgaggcaggttcttgttctgttacccaggctggagtgcagtggcatgatcatggctcattgcagccttgacctcctgggctcaagtgatcctcccatctcagcctcatagtagctgggactataggcaagcaacaccatgcctggttaatttcttgtttttgtttgtttgtttttggtagggacggagtctcgctctgtcgcccaggctggagtgcagtggcgtgatcttggctcactgcaagctctgcctcctgggttcaagcaattctcctgcctcagcctcccgaatagctgagaatacaggcccacaccactacgcctggctaatttttttttttttttttgagacagagtttctcttttgttgcacaggctggagtgcgatggcccaatctcggctcactgcaacctccgcctcctgcgttcaagcgattctcctgcctcagcctcccgagtagctgggattacaagcatgggccaccatgcccagctaattttttagtatttttaatagagacggggtttctccatgttggtcgggctggtctcgaactcccgacctcaggtgatccgcccgcctcagcctcccaaagtgctgggattacaggcgtgagccaccaagcccggcggctaatttcttttgtattttagtagagatggggttttaccgtgttgcccaggctggtctcaaactcctgaactcaggcaatttgcctgcctcggcctcccaaattgctgggattacaggcatgagccaccttgctcggcctgtcatttcttgtatttttttgtagagacagatgtctcaacatgttgcccaggctggtctccaatttctgggctcacgaattccttccatgttggccttccaaattgttggttttacagatgtcagccaccacactcagcccttttttctttttgttagccacttttttttttttttagatggattctcactctgttgcccaggttggaatgcagtggtgcaatcttagctcactgcaacctctgcctcccaggttctagtgattctcatgcctcagcctcctgagtagctggaattacaggcatatgccaccatgcctggctaatttttgtgtgtgtgtatatataaatatatatatatttttttgttgtttgtttgtttgtttttgaaacagagtcttgctctgtcacccaggctggagcgcagtggcacgatcttggctcactgcaacttctgcgttctgggttcaagcgattctcctgtctcaacctcctgaatatctgtgattacaggcgatcaccaccacgcctgactaatttttgtatttttagtagagataggatttcactgtgttggccaggctggtcttgaactgctgacctcaagtggtcctcccacttcggcctcccaaagtgctgggattacaggcatgagccacagtgcttggcctctaattttttttttttttgaggcagagtcttgctctgttgcccaggctggagtgcagtagcgtgatctcccctcactgcaatctctgcctcccagtagcgtgatctcccctcactgcaatctctgcctcccgggttcacaccattctcctgcttcagcctcctgagtagctgcgactacaggcacccgccaccacgcccagctaatttttttgtatttttagtagagacggggtttcaccgtgttagccaggatggtctcgatctcctgacctcctgatctgcccgcctcggctcccaaagtgctggggttacaggagtgagccactgcgcccggcctatttttgtatttttagtagaaacagggtttcactgcattggccaggctggtcttactcctgacctcaaatgatcctcccctcttggcctcccaaagtgctgggattacaggcatgagccactgctcccagccacttcttttttcttgatagcattaattttacttccatagaagatcaaaaagttgtcgtggaaaacttggtctttttattttttaaatttttttattatttacttatttattttgagacggagtcttgctctgttgccaggctggagtgcagtggcgcgatctcggctcgctgcaacctctgcctccagggttcaacctctgcctcagcctcacgagtagctgggactgcaggtgtgtgccaccaagcccagctaatttttgtgtttttagtagagacggggtttccccatgttggccaggatcgtctccatctcttgaccttgtgatctgcccaccttggcctcccaaagtgctgggattacaggagtgagccactgtgcctggcctgatctttttattttagaaccaatatttatggactcaatcatttagagacggcgggcgtggtggctcacgcctgtaatcctaacactttgggggccaaagtggatggaatgcttgagcccaggcatctgaggtcagactcggcaacatagccagccctccatctctacaaaaaaataaaaataaaaattagctgggctggtggcctgtggctgtagtctcagctactcaggaggctgagatgggaggatcacctgagcccatgaggggaaggctacagtgagttatgattgtgccactgcactccagcctgggcgacagagcgagacccttcacacacacacacaaaattaggttaaaaaaaaaaaatgttttggatcgccctgtgagcaaaaggaacaagaacatttacagagagtgatttttgagaattgagactaccttaattcagaatgttttctggtcctgaatttaccagctgaacttctccgttttggacaagccccttcatttctccatgccttagttttctcacttatacaacctatttcagaggactgttgtgaagatggaatgacttaaggtaggcgaaagttttttaaaaagtaataaatgaggggccagtgtaagatagtgttattttcttgttaattaatactatgcttttcttgttcatattataatcttttgtatgaggatgaaaggctaaattatccaataacggccatgggaggatctcaagatgggatgagcttttaggttctgagatttgaagcaaagattggtaaggagacaacaccataggatggaagagcttgtgttttagtctcagaaagacatgaatttgaatgttgactgtggcacttgttggaccaaattattcaacttccctgaggctgggattccttttctataaaacagggatgaaaatctcgtgttttgcaggataattgtgaaaattagagataatgtatgtaaaattcttggcaggtagcacacaccctatatgtgggaagcactgttaaaacactcagggacttgggttgaaatgtcccgacatttgtcttttgctctgtaaaaaataatctcaaccgggcgcggtggctcaagcctgtaatcccgccactttgggaggaccagacgggcagattgcttcattctaggagttcaagaccaaggatcgcggattgcttgagtctaggagttcgagactagcctgggcaacatggcgaaaccccatcactacgaataatagaaacaaattagcacggcgtggtggcgcgactctatagttccaagtactcggcaggatgaggtgggaggattgcttgagcccaggaggtggaggctgcagtgagccgagatcgtgccactgcactccagtctgggcaaaagagagagaacttgtctcaaacaaacaaaaaaatggcccggcgcggcggttcacgcctgtaatcctagcactttgggaggccgaggcgggaggatcacttgaggtcaggaggtcgagaccagcctggccaacatggtgaaaccctgtctctactaaaaacaaaaaagttagccgggcgtggtggcgggcgcctgtaatcccagctactcgggaggctgaggcaggagaatcgcttgaacccaggaggtggaggttgcagtgagccgagatcgcgccactaacactccaggatgggctacagagcgagactccgtctcaaaggaaaacaaaaaacaaacaaaaaaaagtcatcctggtagttaaaagatttgttaaaaaggatgttgaaattattttgtcacggagcctgggagtgtttgtttaatcagttaccgataaagttttggttaaaaaaaaaaaactcggtttgttccgtttcaataaagctttgctcaaacggggagctccgggagctcatcgcgagactcaggtgaaacgcgtttctagtttgggacctgatctcgcgttgtttgataagcaggggaatgaggtgaaagcgaagcacgaaacatcgcgagaggctactggactctcgcgacgatttctgggattgcccctccccccttccccaagtgccgtttcggtttaatctagtgtgtgactgggtctgtgtgagggagagagtgtgtgtggtgtggaggtgaaacggaggcaagaaagggggctacctcaggagcgagggacaaagggggcgtgaggcacctaggccgcggcaccccggcgacaggaagccgtcctgaaccgggctaccgggtaggggaagggcccgcgtagtcctcgcagggccccagagctggagtcggctccacagccccgggccgtcggcttctcacttcctggacctccccggcgcccgggcctgaggactggctcggcggagggagaagaggaaacagacttgagcagctccccgttgtctcgcaactccactgccgaggaactctcatttcttccctcgctccttcaccccccacctcatgtagaagggtgctgaggcgtcgggagggaggaggagcctgggctaccgtccctgccctccccacccccttcccggggcgctttggtgggcgtggagttggggttgggggggtgggtgggggttgctttttggagtgctggggaacttttttcccttcttcaggtcaggggaaagggaatgcccaattcagagagacatgggggcaagaaggacgggagtggaggagcttctggaactttgcagccgtcatcgggaggcggcagctctaacagcagagagcgtcaccgcttggtatcgaagcacaagcggcataagtccaaacactccaaagacatggggttggtgacccccgaagcagcatccctgggcacagttatcaaacctttggtggagtatgatgatatcagctctgattccgacaccttctccgatgacatggccttcaaactagaccgaagggagaacgacgaacgtcgtggatcagatcggagcgaccgcctgcacaaacatcgtcaccaccagcacaggcgttcccgggacttactaaaagctaaacagaccgaaaaagaaaaaagccaagaagtctccagcaagtcgggatcgatgaaggaccggatatcgggaagttcaaagcgttcgaatgaggagactgatgactatgggaaggcgcaggtagccaaaagcagcagcaaggaatccaggtcatccaagctccacaaggagaagaccaggaaagaacgggagctgaagtctgggcacaaagaccggagtaaaagtcatcgaaaaagggaaacacccaaaagttacaaaacagtggacagcccaaaacggagatccaggagcccccacaggaagtggtctgacagctccaaacaagatgatagcccctcgggagcttcttatggccaagattatgaccttagtccctcacgatctcatacctcgagcaattatgactcctacaagaaaagtcctggaagtacctcgagaaggcagtcggtcagtcccccttacaaggagccttcggcctaccagtccagcacccggtcaccgagcccctacagtaggcgacagagatctgtcagtccctatagcaggagacggtcgtccagctacgaaagaagtggctcttacagcgggcgatcgcccagtccctatggtcgaaggcggtccagcagccctttcctgagcaagcggtctctgagtcggagtccactccccaggtgagctatttgtctaacagtccttcctcatttagggtgggttgcgaggaattggcattcagcgtgttaacattgtctggaagcccgcagtgttcatcattgactagaacactttgctgttggctagtcattccagtgtgtgaatctgtctccccttaacccagaattcgagaagtgaagagtacataggcctcaaaccgccaaaggtaggtacttccagtggtggggtcttcagttgtaagcttctgagtgagaaacgtcaaaggcttctgcttagtgagtggatggagttgatactagttcccagagcatgtctagctatttctgttgcttagttttatatttttaaaaatcacattggtatttgtgctttagactctatgggacctggttgaagacttaagaaattggtatggaagttacttgcctagtttatcctatttgtgttgtccactgaatccccaaacctgtacatttattcatttcctacttggcactgttttaattatttacaaaagattcctgtcttttaactgatgttttagtggaaattcagctgattagtctgttacccttttaatggtataacctagcagaaattggttccaaggacaatttggttttctttacagcatcatcactgacctaccttgtgaccgctgacaattttcaaaatctttctctaaaacacatagtaataatgccttctttatatttttgcgagaaaggcatgctagtttgaaattttgttgttagagtgaattatttggaaaactgtgttcttgttcctaggtaatgagatgtatctcctttgtggcctcacttctgttcacaaaaacagaatgtgggctttagttagacctttgtggaatcctaatgttgctttgtgacctttagcaaatgagttaatttctccttgcctgagttgcttcaggtgtaaaatgggaataataaatacctacttttaagggttgtgatgattaaattagtcaatttgaagtgcatagcacagtgccttgtacataatatcactcagtaaattatgagtgaggatgttgaacactggtagagaaattgtgctaatttgaaaaaaattcatgcatgactttttttttttttgaaagacaagatcttgccctgttgcctaggctggagtgcagtggcatcatcttggctcactgcagccttgacttcccaggctcaagcaatccgtccacctcagcctcctgagtagctgggattacaggttcatgccaccatgcctggctaattttttttttctttttcttttttttttttgtagagactgggttttgccctgttgcccaggatggtcttgaactcctgagctcaagcaatcctcctgcctcccaaagtgctgggattacaggcatgagccaccacgcctggctcatgcatggcttttgtatttcagtgtaatttttgctgacttaaagttacaattcataaatggtgtgagtacatcaagctgcagagtgttcctagctgtcaagggctggagttcttaatgtttcctcctccattttattataaaaaattttccagcacagaaaggttgtagtgaacacccatatatgtaacagcaagattctacaataaatatttgctgtatccaggctgggcaacatagtgaggccccgttctctacaggaaaaaaaaaaaaattagctggtcgcggtggtgcacatctgtagtccccactgcctgggaggctgaggtgggaggattgcttgagcctaggaagtcaaggctgcagtgagctgtgatcacaccactgcactccagcctgagcaacagagtgagaccctgtctcaaaaaaaaaaaaaattgggccaggagtggctcacacctgtaatctcagcactttgggaggccgaggtgggcggatcacgaggtagggagtttgagaccagcgtggccaatgtggtgaaatgctgtctctataaaaatataaaaaattagttgggtgtggtggcgtgcgcctgtagtcccagctactcggaaggctgaggcaggagaatcagttgagcccgggaggcagaggttgcagtgagctgagatcgtgccattgcactccagcctaggtgacagagacagagtaagactcagtcttaaaaaaaaaaaaaaaaaagccatgtattttgtaatctatctacctgtccattaatctatcttttattttcatttatttcaaagtaagttgtagacatcagtatacttcattctaaacactttaacatgtttaccattagctggattaccctttttttttttttggaggggtgaggagtaaaatttatatacagtaaaatgcctaagtcttaagtgtagcatttgtaaagctgctttgttttttgtttttttttgagacagagtcttgttttgttgcccaggctggagtgcagtggagcgatctcggttcactgcaacctctgcctctcgggttcaagctattctcctgcctcagcctcctgagagtagctggaattacaagcgcccaccatcacatctggctaatttttgtgtttttttagtagagacagggctttaccatgttggccaggttggtctccaactcctgacctcaggtgatccgccagcctcggcctcctaaagtgctgggattacaggcgtgagccaatgcgcacagccatgctgcttagtgttttaaggaagtctaaaaagtattcttaggatatttgtttcttgatagagtagttcattaaggctgtaaaaattgttaactttagggtatgggaatagagaagagtgtgctaagactaaaacactaaaaggagtttcagtaagaagtgcttctttctagtgattccttttggattcttaggtaaaacagcatatctcatgttctcttaagagagtagaggaggctgggcgtggtggcttatgcctataatcccaagcactttgggaggccaaggcgggcagatctcctgaggtcaggagtttgagaccagcctggccagcgtggtgaaaccccgtccctactaaaaatacaaaaattagccaggcgtggtggcatgcacctataatcccagctactcgggaggctgaggcaggagaatcgcttgaacctgggaggcagaggttatagtgagccaaagtcacgccactgcactccagcctgggcgacagaatgagactgcgtctcaaaaaaaaaaaaaaagaaagaaaaaggccaggcgcagtggatcacgcctgtaatcctagcactttgggaggctgaggcaggcggatcacctgaggtcgggagttcgagaccagcctgaccaacatggagaaaccctttctctactaaaaatacaaaattagctgggcgtggtgtcacatgcctgtaatcccagctacttgggaggctgaggcaggagaattgcttgaacccaggaggaggaggttgaggtgagccgcgattgcaataattgcactccatcctgggcaacaagagtgaaactctatctgaaaaaaaaaaaaaaaaaaaaaaaaaaaaaaaaaaaaaaaagcagatgaatctctactcacataatttagtcagtaatggtaaaaataagtttagaaaaaattggagacacaatatggtagcgtagcatgcaaatataaacatataatattcccagagacacatgcacgcttttagttggcttatagagagcattatatgtttgtatgtgtgcattacatgtttttcttcattgattgaaattctaaacagtacaaaaattttgtagagtcagaggaacatatagatcccttctatgatattctcttgtgtttttttccttgggagacagtcaaaatgaaataagcaacattttattttattttattttattttatttttttaatttgagacagagtttctgtcgccaggctggagtgcagtggtgcgatctcagctcactgcaacctccgcctcccaggttcaagcgattctcctgcctcagcctcccaagtagctgggactacaggcgcgcgtcaccatgcccagctaatttttgtatttttagtagagacggggtttcaccatgttggccaggatggtcttgatctcttgacctcaggatctgcctgcctcagcctcccaaagcgctgggattacaggcatgagccaccatgcccggcgaaacaacctaattttaaaagactgaaaatgctttggcagaaatgcagtgtctttgcatccgctagattagcaatgattaatagttgagtggaacctaacttaattcggtgagtgggggggaaatacatttgtttttgaagacatttcttgaagacacattgcttattgctggctgtgtttacctatttgttgtctactcctccgcttttttctagaagagtgaacctggaacttaaatgtagcatttgtatcactaaaaataccacaagtatatggccatccaaatctgttaacagtaggcttctgtgagaaattgaagggtttctaacagacttccttaggaagatttggtcatgctgactaaaacagtagtacttggtagctagctggcattagtgttttgggttttacatgttttccctgggatagagatgttacttagctgtatttcaagcagagaaaaactcttgtttcagccaaatatgtacagaaggaatgttagttttcttaagggtaagtgcatatttggtcaatatcagtacctttcagtattttatattctcatgttcatgtttgcgttgttgttttttagtcctattgattccaacaatatttttagttttgtttttttttttgagatggagtgtctctctgtcacccaggctggagtgcagtggcgtgatcttggcttactgcaacctccgcctcccgggttcaagcaattctcctgccttagcctcccgagcagctgggattacaggcgcacaccaccatgcccggctaatttttttgtatttttagtagagctgggatttcaccatattggtcaggctggtctcaaactcttgatcagggtgatccacccgcctcagcctcccaaaatgctgggattacaggcgtgagccaccgcgcccagcttccaataataattttatattttaactgacttttggaagcaaacttgcaagaagcagtataggtaaaagaaaatcatcgctgccattatgcaagttgtttcccttacacatatatgttgttttgaaacattttggttcatgtcagtcttactatatgtcagtcttaccatatctccctgatcaaagataaaggaagatgtgatgatctagaatggaagcaatttgttttagactactgggaaaattttgttttgtccaattatgcttttaatatttttattttatttatttatttttttgagacggagtttcactcttgttgcccaggctggagtgcattggcacaatctcagcttaccacaacctctgcctcccaggttcaagcggttctcctgcttcagcctcccgagtagctgggattacaggcatgcatcaccatgcccggctaattttgtatttttagtagagacagggtttctccatattggtcaggctggtctcgaactcccgaactcaggtaatccgcctgcctcagcctccgaaagtgttgggattacaggcgtgagccacagtgcccggcacttttaatgtttttattttaattaattaattaatttatttatttatttatttattttgagacagattttcgctctgtcgccagcctggagtgcagtggcgcaatctctgctcactgcaaccttggcttactgcaacctccgcctcctgggttcaagtgattctcctccctcagcctcccaagtagctgggaatacaagcatgtaccaccacacccagctaatttttgtatttttagtagatacagggttttaccatgttggccaggatggtcttgatctcctgacctcgtgatctgctgcctcggcctcccgaagtgctgggattacaggcgtgagccacagcacccggcctttgttggttttttgttttgtcacacattgaggccttagcaggttaggctttagtaaaaagtcatgagaattaatgacatttgggtttcaacttaaaatgatctgccccatagattcccagattttatttccaaagcctttcttaagaagacaattaattaaacatgcaataatatctttaggagtttctaaaaagtctattggaaatcattttataataaagatattaggagccctcatgtttttgaaacgttctaaaagttattttggtaaatcattttctccactttatttgttttgtaaatcctaagccttatgtgttgggaatttgtttagtactttattttaaactttacaactttattataaactgaggatgcaaggaacaacatatttttctgggctctgccatttaactctctagctaacaaatttaggttttggtgaagcatgcttgttgcttttaacttcctgatggatataacccacctttactatggagtatgacttcttttttttttttttttttgagacggaattttgctgttgttgcccaggctggagtgcagtggcacaatctcggctcaccgtaacctctgcctcctgggttcaagcgattctcctgcctcagcctcccaagtagctgggattacaggcgcccaccacaacgcctggctaattttgtatttttagtagagacggggtttctccatgttggtcaggctagtctcgaactcccaatgtcaggcgatccacccatcttggcctcccaaagtgctgggattacaggcgtgagccaccgcacctggccaagcatgactgccttatcctgttttcactttatcaaagattaaattcaaaattctgaaagtaatcattgtgagtatggctgtttcttttccaatgtgggaaaaaaatagtgacccatcttttttcagatgaataagtagtagataattttattgttatatgattcagatatgttttcatgtaggatttagtttaatctattttttttttttttgagatgtagtctcactctgtcgcccaggctggagtgcagtggcttactgtaagctccacctcccaggttcatgccattctcctgcctcagcctcctgagtagctgggactacaggtgcctgccaccacgcctggctaattttttgtattttttagtagagatgcggtttcaccgtgttagccaggatggtctcgatctgctgacctggtgatctgcccgcctcagcctcccaaagtgctgagattacaggtgtgagctaccgtgcccagccagtttaatctattttttaaatgaactttatttctttagagtagtttaagatttacagaaaaattgtgaagatagcgcaaagaagtctcatatatccctgcatccagtttctcctattgttaacatcttacattaatgtggtacagttgttacagttaatgagccaatattgatacataattataaactggagtccatactttatttagatttacttagtctacctaatgtccattttctgttccaggatcttactcattataccatcttacatttagtcctgtctccttggggtgcctcttgattgggctggtttctcagactgtcctcgtttttgatggcacttaatctattttacaattgataagttacagttcttcatagtttgttttattgatctgttttcctccatatactactgtagtccattcatttaaaactggctttttatttttccagtaggaaatccatgaagtccagaagtagaagtcctgcatattcaagacattcatcttctcatagtaaaaagaagagatccagttcacgcagtcgtcattccagtatctcacctgtcaggcttccacttaattccagtctgggagctgaactcagtaggaaaaagaaggaaagagcagctgctgctgctgcagcaaagatggatggaaaggagtccaagggttcacctgtatttttgcctagaaaagagaacagttcagtagaggctaaggattcaggtttggagtctaaaaagttacccagaagtgtaaaattggaaaaatctgccccagatactgaactggtgaatgtaacacatctaaacacagaggtaaaaaattcttcagatacagggaaagtaaagttggatgagaactccgagaagcatcttgttaaagatttgaaagcacagggaacaagagactctaaacccatagcactgaaagaggagattgttactccaaaggagacagaaacatcagaaaaggagacccctccacctcttcccacaattgcttctcccccaccccctctaccaactactacccctccacctcagacaccccctttgccacctttgcctccaataccagctcttccacagcaaccacctctgcctccttctcagccagcatttagtcaggttcctgcttccagtacttcaactttgcccccttctactcactcaaagacatctgctgtgtcctctcaggcaaattctcagccccctgtacaggtttctgtgaagactcaagtatctgtaacagctgctattccacacctgaaaacttcaacgttgcctcctttgcccctcccacccttattacctggagatgatgacatggataggtaagtcctatagtgaactggaaaaaacccccttgatctaaacataaagcattttctgttttaatctttgtcaacactaccctcatggttttatgaacaggaaatgtctttgatattttcagtgggaaagtctgtaattatgacattattacttgggaagagagaattagaatttgaggcctggttaacccattttatcattaagtttattttatttattttgtattttttgtattttgagacatggtcttgctctgtcgcccaggctgtaatgcagtggcgtcatctcagcttactgcaacatctgcctcacaggttcaagcgattctcccacctcaccctccccagcagctgggactacaggcatgcaccaccatgcctggctaatttttgtgtttttagtagagatggggtttcaacatgttggccatactggtctggaactcctgacctcaagtgattttcccacctgggcctgccaaagtgctgggattacaggcatgagccaccatccctagcctaagtttattgataatgctaattttgattaaaattttaaaaaaatcgagttttcccttaaatttttgttgaaaatattaatacctatagaaaaattaaaagaataataggctgtatgcagtgactcatgcctgtaatcccagcactttgggaggctagggcaggcagatcacctgaggtcaggggttcaagaccaggctggccaacatggtgaacccccatctctactaaagatacaaaaattagctgggcgtggtggtgggcccctgtaatcccagctacttgagaggctgaggcaggagaattgcttgaacccaggatatggaggttgcagcgagccaagattgcatattgccgtatttgctctgtggatatcatgacactttacttctaaatatttcagtgtgtctctcctaataataacgttctatataattacaatatcttcatcaccctgaaaaatttaacattgacttagtaacatcaatagttatataaataacatgctatcggccaggcgcggtggctcacgcctgtaatcccagcactttgggaggccaaggcgggcggatcacaaggtcaggagatcgagaccatcctggctaacaacggtgaaaccctgcctctactaaagatttaaaaaattagctgggcatggtggcaggcacctgtagtcccagctacttgggaggctgaggcaggagaatggcgtgaacctgggaggcggaggttgcagtaagtcgaaatcgcgccgctgtactccagtctgggcgatagagcgagactccgtcttaaaaaaaaaaaaagctatcaataatcataatatttaaccaaatagtcccagtagcccccaaaatgtctttattgttggtttttgttttcagttggaattcaaaataactcacaaaatgtcttttatagccgggtttgttttttctctcctgatcccagggtccaaactaggattattttgaaaagggctgctttaaaaaaaaagaaattattccataaaaagtaaaagaataatatgtaaagtatttgctaattagaatataattcacaatgggatgatgggaagagctttaattttaatgagtcctctgtatattgagaactgaaatgattatgaagcatgaatctaattttatagaaggcattaacaaaaatacttctttaaggctgggcttggtggctcacgcctgtaatttcagcactctggaaagccgaggtagataagatcacttgaacccaggagttcaagaccagcctggccaacacgatggaaccccatctctactaaaaaaaatacaaaaattagccgggtgtggccaggtgcggtggttcatgcctttaatcccagcactttgggaggccaaggcgggcgaatcatgaggtcagcagttcaagaccagcctgatatggtgaaaccctgtctctactaaaaatacaaaaattagctgggcgtggtggcggttgcctatagtcccagctactcgggaggctgaggcagaagaattacttgaacccaggaggtggaggttgcagtgagctgagatcgtgccactgccctctagcctgggcaacagagccagactccgtctcaaaaaaaaaaaaagaaagaaaaattagccaggcgtggtggcaggcgcctgtaatcccagctactcagaaggctgaggtgggaggattgcttgaactcaggaggcagaggctgcagtgagccgaggtcatgccactgcactccagcctgggtgacagagcgaaactttgtctcaaaacagtatatatgtatttccttaatatcttgacaggactaactaggcaagtaccaccaaacacacttgctttagcagtgacatgtgatggcagtctttgtgttatggtttgcttattctactgtgatattgtgctctttgggatgtgaattgcatttattgaaacaaacttttcattgtaagcacaaaattaagtgccaccgatcttgcatcctagcctaattcccaagccttcattcctttcaaggtgataattgtaattttatttcattttattttgagacaggatctggctctgtcccccaggctggagtgcagtggtgtgatctgggcttattgcaacttctgcctcccagactcaagtgatcctcccacctcagcttcctgactagttgggattacaggtgcatgccactacacccggctaatttattttttgtagacatggggttacatcatgttgcccaggttggtcttgagctcctggactcaagtgatccgcttgctttggccttccaaagtgttgggattacaggcatgaaccaccactcccggccaatattggtcatttgaatgatgatacattgcagccctctgggtgagaaagtatgttttttcgtaccctctgttctttagagaagatgcaagtacagtaaatggaaagggggaaaaaaactattttaaggaatggctccatcactatagaaagaaatatgatgtttccttttttttttttttttttttttggcattaccagactgccaaaatctgattttttatttttatttttttttgagatggagtctctttctgttgcccaggctggagtgcaatggcgcgatctcagctcactgcagcctctgcctcctgggttcaagtgattctcatgcctcagctcctctgagtagctgagattacaagcatgtgccaccatgcctggctaatttttgtatttttagtagagacagggtttcaccatgttggccaggctggtctcgaactcctgaccttaaatgattctcccacctgggccttccaaagtgctgggattacaggcatgagccactgcacccaacccaaaatgtgattttaaagaaaaattccatatactctttctaacattaataggtatttatggactgagctttgtggatgtaatcccagtactttgggaggccatggtgggaggactgtttaaggccaggagttcaaaaccagcctggacaacaacatagtgagaccccatctctataaaacatttaaaaattagttggatgtggtggcaggtacctttagccctagctacttgggaggctgaggcaggaggatcacttgagcccaggagttcaaggctacggtgaactatgattgggccactgtacgccagcttgtgtgaaagagaccctgtctttaaaaataaaattttaattaaaaagtaataacaaattctgccacgtgatgaaaattacagaagagaagagaacctgaaattttttttttttttttttgagacggtgtctcacactgttgtccgggctggagtgcagtggcgatcttggctcactgcaaactccatctcccaggttcaggcgattcttctaccttagcctcccgagtggctaggattacaggtgcctgccaccacgcccagctaattttttgtatttttagtagagacagggtttcaccatgttggccaggctggtctcgaactcctgacctcgtgattcgcccacctaggcctcccaaaatactgagattacaggtgtgagccaccatgtcaggaacagaatctcaaatttatgtggaaaaaattaacttgaggtccaaaatatagatagataaaagccatagataaaaagataaaagccatatttttatagtttttgttggaaaaggaaatagttgagcattgtccaaagggaccctggccctttagctataggaacctcatttcaatacttgtttacatagtggctagaatattaatgtgggtaagaatcttgattttttttttttttacttcagaaaaatgtttaggaaacaaaaagcatcttgatgatttttttcttttttgagatagattctctctccatagccaggctggagtgcagtggcaagatcttggctcactgcaacttcccagggttcaagcgattctcctgtctcagcctcccgagtagttgggaccacaggcacccgccaccacacccagctaatttttgtatttttagtagaggtagggtttcaccatatttctcctggatggtctcgatgtcttgatctcatgatctgtccgcctcagcctcccaaagtactgagattactggcatgaatccccgtgccccaactatttattattttatttatttattttttgagatggaatttttgcccttgttgtccaggctggagtgcagtgatgtgatctcggctgcatccgcctcccgggttcaagcaattctcctgcctcagcctcccaagtagctgggattgcaggcacctgccaccatgttcaactaattttgtatttttagtagacaatgggtttcgccctgttggccaggctggtcaggaactcctgatctcaggtgatctacctgccttggccccacaaagtgcagagattacaggcatgagccaccatgcctgcctttttttttttttttttttttttttttttgagacagagttctgctctgtcgcccaggctggagtgcaatggggcaatctcagctcacgcaacctccgcctcccaagttcaagcgattctcctgccttagcctcctgagtagcttggattacgggtgcccaccaccacgcctggctaatttgtgtatttttattagagatgggggtttcaccatgttggttacaaactcctgaccttaaatgatccacctgcctcgggcttccaacgtgctggaattacaggcgtgaaccaccaagtccagccctaatctaattattattattattttttgagacagtctcactctgttgcccaggctggagtgcagtggtgccatcttggctcaccacaacctccaccaccagggttcaagcgattctcctgcctcagcctcctgagtagctgggactacaggtgtgtgccaccatgtctggctaatttttgtagtgtttttatttttgtttttgttttagatgaagtctggagtctcactgttgcccaggctggagtgagtctcaccctgttgcccaggctggagtgtagtggcgcgatcttggctcaccacaacctccacctcctgggttcaagcgattttcctgcctcagcctcccaagtagctgggactacaggcgcatgccaccatgcccagctcatttttttgtatttttagtagagacggggtttcactgtgttggtcaggctggtctcgaactcctgacctcaggtgatccacccaccttggcctcccaaagtgctgggattacagacgtgagccactgtgcccagctaatttttgtatttttatttttatttatttattatttattttttttttttttttgagtcagagtcttgctctgtcgcccaggctggagtgcagtggctcgatcttggctcactgcaagctccacctcctgggtccacgctattcttctgcctcagcctcccgagtagctgggactacaggcgcctgccaccacgcccagctaattttttgtattttttagtagagatggggtttcgccgtgttagccaggatgatctcgatctcctgacctcgtgatctgcccaccttggcctcccaaagtgctgggattacaggcgtgagccactgcaccccgcctatttttgtatttttagtagagacggggtttcactacattgaccaggctggtcttgaactcctgacttcggggtctgcctgcctcggcctcccaaagtgctgggattacaggcatgagccactgcaccgggcccatctaattatttttaaacatgattttttttttttttagccatctcctcctccacctctttttttttttttttaagagacggggtcttgctatgttgcccaggtttgtcccaaactcctcaactcatgtgatccttccaccttggcatccctaaatgctggcattacatgtgtgagccactgagtttggccattatttttttttttgagatggattcctgctgtcactcaagctggagtgcagtggctcaatctcagctcactgcaacttctgcctctggggttcacatgactctcctgcctcagcctccccagtagctgggactacaggcgcatgccaccatatccggataatttttttgtatttttagtagagacagggtttcatcatgtcatccaggctggtcccgaactcctgaccttaggtgatccacctgccttggcctcccatagtgctgggattggaagcatgagccaacgtgcccagccctggccatgattattatcagtattctacatataaataaattattaaaggtagaaaaacggaaatagaccaggtgctgtggctcactcctataatcccagccctttgggaggccaaggcaagaggcttgtttgagcccatgtgttttaggctacatagccagaccctgtttctaccattaaacaagaaaaggcatgatagcatgcacctgtggtctgagctacttgggagactgaggtgggatgattactggagcctggaaggtcagagctacagtgagccatgatcgcaccactgcactctagcctggataacagtgagatgttgtatcaaagaaaatgagatgaggatgtcttccattatcaattttatttttttattttaaattcatgatgtgtttctgtttctattttgtatgtgtgtgtgtgctgctatatccatgtaccagctgctccatatccatgtaccagctgctcctatctttgacatgaaaagtaatttttacataggaaagctttttagaaagaaatctaatggccgggtgcggtggctcacacctgtaatcccagcactttggaaggctgaggcgggcagatcacgaggtcaggagatcgagaccatcctggctaacacgatgaaaccccgtctctactaaaaatacaaaaaattagccgggcatggtggcgggcccctgtagtcccagcagctcgggaggctgaggcaggagaatggcatgagcccgggaggcggagcttgcagtgagccgcgatcatgccactgcactcgagcctgggcgacaagagcgagactccgtctgaaaaaaaaaaaaaaaaaaaaatctaaaagttttgtaaggagctcacttatattctctgttttatcttctcactcgagactgcagcagcataatgttgagaatgtgacttacacatcatttttagtatgttgtgggtggaatacagaatgcaattagtaatgttggttattttaattgatgggtaaataaaacttctaatggagccaggatcagggcttgtgtgaaatgacagtggacttgtaaaagaagtcagtgtgcacataaagaacataaagcttacattagaggatttgtctgtttttttttgttttgttttgttttttgtttttttcccccgagacagagtcttgctctgttgcccaggctaggatgcagtggcatgatctcggctcactgtaatctccgcctctcgggttcaagcaattctcctgcctcagcctcccaagtagctgagactataggtgctcaccaccatgcctggctaatttttgtatttttagtagagacagggtctcctcatgttggccaggttggtctgaaattcctgacctcaggtgctccacccaccttggcctcccaaagtcctgggattacaggcgtgagtcactgcactggcttttttttttttttttaagacagagttttgctcttgttgcccaggctggagtgcaatggcgtgatctcggctgactgcaacctccacttcctgggttcaagcgattttcctgcctcagctgcctgagtagctgggattataggcccccgccatcacgcctagctaatttttatatttttagtagagacggggttttaccatctttcccaggctgattgcaatctcctgacttcatgtgatccactcatctgggcctcccaaagtgctgggatataggcgcgagccaccgtgtccagcctagaggatttagtgtcattttgggaaaagaatgaaactttactttttttttttttttccgagacagagtcttactttgtcgtccaggctggagtgcagtggcgtgatcttggctcactgtaacctccatctccatctctgaatcccaagtgattctcctgcgtcaccctcccaagtagctaggattacaggcatgtaccaccatgcccagctagttttttttttgttttgttttgtttttttgagagttttgctagttgcccaggctggagtgcaatggtgcgatctcagctcactgcaacctctgcctcctgggttctagcgatccaccttcctcagtctcccaagtagttgggattccaactaattttttgtatgtgtagtagagagagggtttcaccacgttggccaggctgatctcgaacctctgacctcaagtgatccacctgccttggcctcccaaagtgctgggattacaggtgtgagccagcacgcccagccgaaacttttcttttctttcaaacatgtattttgaataggagtgtactagctcaggtatcaaatgcaagagtgaattcagctaatggtatttcaaaagcctttctcatttgtggtctataattcttgatttcaagaagcaaggcagcccacgtccaacatagtacaatctacatgaccatagctattaatggatatatttctgccttaagtagatcatctgtatacttttcttagaaatttcagttaaccagccgggagtggtggatcacgcctgtaatcccagcactttgggaggccgaggccggcggatcacctgaggtcgggagttggagaccagcctggccaacatggagaaaccccgtctctactaaaagtacaaaataagcagggtttggtggcccatgcctgtaatcccagctgcttgggaggctgaggcaggagaatcccttgaactcggggggcggaggttgcggtgagccgagatcacgccattgcactccagcctgggcaacaagagcgaaactccgtctcaaaaaaaaaaagaaaaaaaaaaaagaaatttcagttaaccatatagaatttttaaagtcttcttttcttctttctcttttttttttttttttgtggcagaatctcactgtcacccaggctggggtacactggcgtgatcttgcctcactgcaatctccacctcctggcctcagcctcctgagtagctgggactacaatcacaagccatgcccggctgtttttttttttacatttttggtagagaccaagttttgccatgttgcacaggctggtctcgaactcctgagctcaagcagtctgcccaccttggtcttccaaagtgctggaattacacgtgtgagccactgcgcccagcacttatgtgcttgctcgctcgcgcgctctctctctctctctctctctctctctctctctctctctctctctctctctctctctctctctctctctctctctctttctcttttcttttttcttttttttttttgacaaagtctcatcctgttgcccaggctggactgcgatggcactatctcggcacactgcaacctccgcctcccgggttgaagtgattctcctgcctcaccctcccaagtagctgggattacaggcaagcgccaccatgcctggctaattttttgtatccttagtagagatggggtttcaccaggttggccaggctggtctcaaactcctgaccttgtgatctgcccgcctcggcctcccaaagtgctgggattacaggcatgagcctggcttgccttttttttttttttttaacagagtttcgctttttttagcccaggctggagtgcagtgttgtgatctccactcactgcaacctccacctcctgggttcaaccaattctcctgcctcagcctcctgagtagctggattacaggcgtgtgccaccacaccctgctaattttgtgtttttaatagagatggggtttcaccattttggccaaggtggtcttgaactcctgacctcaggtgatccacccgcctcggcctctcagagtgctaggattacaggcctgagctaccgcacctggccttgctctgtttttctaatagccttgttcatttggagcgtactgaacttcaggggagtctacattatttttaaaggctgtatctctataagttcagtaaactccaaatgaaccaggattttcctagtagaatgggatgcttggtttccattttttatgtacttaactaaacttttttttttagggaacacttcacgaatttgtgtcatctttgtgcaggggccatgataatcttttctgtattgttacggttttagtgtatgtgctgccaaagtgaacaatcaactacatttttttttttttttttttttgaggcagagtgtctctctgtcacccaggctggagtgctgtggtatgaactcagctcactgcaacctacgcctcccaggttcaaacaattcttgtgccttagcctcccaagcagctgggattacaggcatgtgccaccatgcttggctgatctttgtatttttagtagagaggggttatgccatattggctaggctgttatctaactcctggcctcaaacaatccacctgcctcagcctttcaaagtgctgggattacaggtgagagccactatgcctgcctcaactaaatttttttttttttttttttttgaaacggagtctcactctgtcctctaggctggagtacagtggcatgatctcggctcactgcaaccttcgcctcctggatttaagtgattctgctgcctcagtctcctgaatagctggggttacaggcttgtgccaccacgcctggctaatttttgtatttttcgtagagacggggtttcaccatgttggtcaggctggtctcgaactcctgtcctcaagtgatccacccgccttggcctcccaaagtgctggcattacaggcgtgagccacctcgccctggctcaactaaatttttgataaaagtttgtaaatagtggtgaaatcactgtttcttttcttttttttttttaagagacaagttttccctttgtcgcccatgctggagttcagtggcctgtgcacagctcacagtatcctctacctgctaggctggagcgatctttccacctcagcctctcaagtagcttggactacaggcacgtgccatcatgcctggctaatttttgtacttttttgtagagatggagtttgactgtgttgtccagggtagtagaactcctagacacaaggaatacaccttccttggccttctaaagtgctaggattacaggcatgagccaccgtgcctggtctgaaatcatgttttaaacaaccaacttcaaggggaaggagataaaggattatatttaaagtagtttacgctgttaaaatgggcaaattatctcattgaaaaatttagtgttttttaaacagttacaatttatttatttatttatttatttatttatttatttatttattttttgaggcggattcttactctcatgatccgcctaccttggcctcccaaagtgctgagagtacaggcgtgagccaccacccctggcgtaaatatttataaattttatattttttcttttttttttgtttgagacaggatcttgctctgttgcccaggctggagtgcagtggcatgatcttggctcactgcaactgctgcctccaggttcaagtgattctcatgcctcaacttcccaagtggctgggattacaggcatgagctaccacacttggctaagtttttgtatttttagaagagacagggtttcaccatgttggccatgctggtctcaaactcctggccttaagtgatatgcctacctcggcattccaaagagctgggactacaggccgtagtcaccattcctggtctatattctttttttattaacagtatttttattagaagtgtttccattacacccacagattcagttcagattccaaaatactattcatattctaaaagtttggcagtcctagagcttggtaggtttttaaattacacatgtattatgaaacctaattaccacatgtgaatttgtgtataggtataaatggggaactaggaaatactgatatagttagggtacatcagcgcttcctggtagtgacttttcaagtaatgactgtgatgtatagtatctgctcccctatgatagactcactttgcatgtaccacatgtccgcaaccctttataatactgagtgtcctatgctaaaggtgataatgttaagcattgtagttttgaggctgtcattaaattttcaaggtttttagtacattggaatttactgaaacaggatttgacctctattcaaattgtatatcctgaactggtaggacataacctatcaaatactcattctgtcttgaaataaacatgctaaaaatgtaatattttagaagcagtatacatttttcatacatgttcaatatccctaatccaaaaatctagaaatcctccaaaatcaggaacatttttagcgctgacatgatactcaaaggaaatgctcattggagcatttcagtattcagatttttgcattgaatatgctcatccagtataatgcaaataatccaaaatctaaaaattttaaaaatttgaaacactcaggccgggtgcggtggctcacgcctgtaatcccagaactttgggaggccgaggcgggcggatcacgaggtcaggagatcgagaccatcctggctaacatggtgaaaccccgtctctactaaaaatacaaaaaattagccaggcgtgatggtgggtgcctgtggtcccagctactcgggaggctgaggcaggagaatggcgtgaacccaggaggcggagcttgcagtgagctgagatcgcgccactgcagtccagcctgggcgacagggcgagactctgtctcaaaaaaaaaaaaaaaaaaagttcagacactctggtttgaggcattgtggataagagagtacctaatctgtattagtactttatttgagctcataaagtaaacattggagaaaacaaaaatatgaaacacagattggctgggcatggtggctgatgcctgtgatcccagcactttaggaggccaagctggaggattgcttcaggtgggagtttgagaccagagcttaggcatccccccccttttttttttttttttttttttgggaaacagagtctcactctgtcgccaggctggagtgcagtggctcaatctcagctcactaatctccacctcccgggttcaggtgattcccctgcctcagcctcctgagtagctgggactaacaggcgggtgccaccacgcctggctaattttttttgtattttggtagagacagggtttcacaatgtttgccaggatggtcttgatctcctgacctcatgatccccggcctcggccccctaaagtgctgggattataggcatgagccactgtgcctggcccctgtctcttaaaaaaaaaaaaagcagctgtggtggtatgcacctgtagtctcagctgcttggaatgttgtagtgggtagatcacttgagcctcgaggctgcagtcagctatgattgcaccactacagtccagcttgggtgacacagcaagatcctgtctccaaacagacaaaaaaccatagactgaatttatttgaaatgatgatgacacaattaaaataccttaatttttcttttttctttttctttttttttttttgagacagagtcttgctctgtcgcccaggctggagtgcagtggggtgatcttggctcactgcaacctctgcctcctgggttgaagcgattctccttcctcaggttcccaagtagctgggattttgggagtgcaccaccatgcccagctaatttttgtacttttagtagagatgcggtttcaccatgttggctaggctggtcttgaactcctgacttcaggtgatccgcccgcttggcctcccaaagtgctgggattacagacatgagccactgcaccctgcctcttttttttttttttttttttttctgtgaaacagaatcttgctctgtcacttagactggagtgcagtggcacaatcatggctcactgcaaccttggcctccttccctggctcaagtgatcctctcgcttcagcctcgatagtagctgggaccagaagtgcatgccaccactcccagctaactttgtttattttttttagagataaggtctcactatgttgctcaggctggtcttgaactcctgggctcaagcaatcttcctgccttggctcccaaagtagtgggattacaggcatgagtcaccatgctcagcctgatttttcttgttcttctagtgaagccaaaccaagaagaaatctgttttgaataatgaggaattgagatttgtaaagaatattccgacagtggttgagaaattacaagttttttttcgctgaacatcttaaaaattagaataatttaaaaaatctatgttggtggggtgcggtggctcatgtctgtaatcccagcactttgggaggctgaggtgggcagatcatgaggtcaggagttcgagtccagcctggccaatatggtgaaaccccatctctactaaaaatacaaaaaactagccgggcgtagtggcacacgcctgtagtcccagctacttgggaggctgaggtagcagaatcacttgaacccaggaggcagaggttgcagtgagccaagattgcaccactgtactccaacctgggcaatagagggagactccgtctcaaaaaaaaagaatctatattacattgtgactcaaagagttttctgataataagttttgtttctaggatggaaaaatctgagtgcagattataataatgttgcatgttcatctctcccagtatttcaacagaaagtttcagatgatcattatctactccactgactatcccagttctggttgatgtggtacaaactaacctatattgtattgttctgtctgatttacaagggattaaaacgataaaaattggcaggagtcaatagctgttgagatttatgttcttatattttgagtaaatgacattcttttatggaaaattcacacacaagggttaacagtattctttaaaaagatacattgcaagagatagatctttgtggtctaggaaatattcatgcaaagcaccaatattttcctttataactacctgtcataaaaatagagaagattgcctgtggttaaggttctcagatctttttcaaccatctgatactgtgaaggaatagagaagacctatctggcctgattttatttgtagacatgagttagtctgttgtactatagatgtcttattttttctgaggatgtgcatgacacaatttttttttttttttttttttttttttgagataaagtcttgccctgtcacccaggctggagtgcagtggcacgatctcggcttactgcaaccttgacctccccagttcaagcaattctcatgcctcacaagtagctggaactacaggcacatgccaccatgcccagctaatttttgtatctttatttaatagagatgaggtttcaccatgttggccaggttggtcttgaactcctgggctcaactgatccgcctgccttggcctcccaaagtgttggtattacgggcatgagccaccacacctggctcttggcacaaaatttctctaccacttattaataaattgagataggcaaaaaattgtatctgggccatacgtggtaggaggcgaggcaagagcatcacttggggaggtccaggattttgtgactagcctgggcaatatggcaagaccttgtctctacaaaaaatttcaagaattagctgggtgtgttggtgtgtgccgtggtcccagcttcttaggaggctaaggtgaaagtgttgcttgagcccgggaaattgaggctgcagtgagccatgattgtgtcattgcattccagcctgggcaacaaagtgagtccctgtctcaaaaaaaaaaaaagattgaaaactgacttttctgatctattcctggaaacctatctttctacaaaaccccactgactactataatttactgattactgggagaggcttctgccaccaggtgccttaataattctgaaatagttgcttggaccctttttctttagatttttagtttgatgattgtctattttggctggtcaggtttgccttctgctttgaagtgaacggaatgattcagtatattttttattagttttgacttacaacttagctatatttctatttttttgtaaatatcttcggcaatttatattttttacagggaaagcattctaaaatactatttcttttttccaagatttttgcacctctttagcgatagagtagtattaaattgttgagctcttcttgtttgttaaatctttgctaaaatgtagagtaaattcgatgaactccacgagttgcagtgatactttgtgaatttaagaaaattacttcctgcattttatttctatttttaaattttttatttttcgagacagagctgccctttgttgcccagggtggagtgcaatggcatggtgatggctcactgtagctttgacttcctgggctcaaatgatgctcccaccccaggactgccggttgccatctgcccccaagtagctggaaacacacacttataccaccatgtccagctaattatttttgagacagagtcttgtcacccaggctggagtgcagtcgtgcgatctcagctcactgcaacctcctcctcctaggctcaagcaattctcctgcctcagcctctcgagtagctggaattacaccaccacacccagttaattttttttttttttttttcgagatggagtctcactctgtctctccggctggagtgcagtggcgcgatctcagctcactgcaacctccacccctggggttcaagcagttctcctgcctcagcctcctgagtagctgggagtacaggtgcacccagctaaattttgtattttaatagagatggggtttcactgtattgcccaggctggtctcgaactcctgagttcaggcagtctgcccaccttggcctcccaaagtgctaagattacaggcgtgagccaccgtgcctggccagtttctatatttttagtagagacagggtttcaccaggctggccaggctgatcttcaactcttgacctcaagtgatctgcccacctcagcctcccaaagtgctgggattacaggcatgagtactgtgcctgttctaattttttttttttttttgagacggagtttcatactgttgcctgggctggagtgcagtggcacgatcttggctcactggaacgattcaagcaattctcctgcctcagcctcctgagtagctgggattacaggcagctgctaccatgcccggctaattttttgtagttttagtagagatggggtttccctatgttggccaggctggtctcgaacttttgatctcgtgatctgcccgcctcagcctcccaaagtgctgggattacaggcttgagccaccgtgcctggcctaattttttttttttttttttaattttttgtagtgatggagtctcactgtgttttccagggtggtctcaaactcctggcctcaagcaatcctcttgcctcagcctcccaaagtgctgggatcacaggggtgagccaccatgcccaggtgaattttatttcatctcaataaaactccaaataaaatcttaggaacgatatattaagagtttgataaagggaactgcaagtaatatcacaaatatttcattgtttttaaaatatactatagatttctatttataaaatttatctcagccaggcatggtggctcacgcctgtaatcccagcattttgggaggccgaggcacgtggatcatttgagaccaggagttcaagaccagcctggcaaacatggtgaaaccccatctctactaaaaatacaaaaattagtctggcatggtggcacacgcctgtaatcccagctacttgggaagctgaggtaggagaatcacttgaacccaggaggcagaggttgtagtgagccaagatcacgccactgcattctagcctgggcgacagagtgatactctgtctcaaaaaaaaaagaaaaaaattaagtatctttagttgtgattaattatttttttttatgttatagtacaggtttttttccttaaaaattagatctttctaaccttttcgtaaccaggcattatgatctttgaaaatttttatttgcgtatctttaattgtaattttgtcatctcttctcatttattgtttagtccaaaagaaactcttccttcaaaacctgtgaagaaagagaaggaacagaggacacgtcacttactcacagaccttcctctccctccagagctccctggtggagatctgtctcccccagactctccagaaccaaaggcaatcacaccacctcagcaaccatataaaaagagaccaaagtgagtttttggaggaatctgtctttcatgatagttttctcccttccttttgaactaaatctctcatgtttcttctataacccacaccagtaagatcgtagaagtttggtcccaaagtattttttaattttattttaatggacaaaagcctttcttggagactcaggtcattcatctatgccctcagatacccagctatgtttttagaacaacagaaaattcccaaatccagatatactatgaatgtttatctcattatgtcttttttattcataatatttagagtactaaggaagaataaaagctttttaaattcaggatgtgtcaatcgtgtacacattaaccaaaaattaatagatatgggatttttcttcctgaaagcatataaattgtcatgccataaattgagtataaatatgggtctaatcttctgattgttagcatttctctcttaataataaaaataggtatcatttattgagcacgtattattgtcgtagttttatatatacacatttttgagacagagttgcgttctttgttgcccaggctggggtgcagtgatgctatctctgcttaccgcaacctcggcttcctggttcaagcaactctcctgcctcagcctcccgagtagctgggattacaggcacgtgccaccacgccaggctaatttttgtatttttagtagagatggggtttcaccatgttggccaggctggtctcgaactcttgacctcaggtaatccaccgccttggcctcccaaagtgctgggattacaggcgtgagccaccgcgtccggccttatattttcatagcagccttagcatgtagcgattaatttcccattttatagttaaagccatacctgagagagttcagaaagcaagcaactaatctattatttcagtgtatgtcttcctaaagctgtagccctatgtcttagccactgtgagagactgtttatgtatttttttttttttttttttgagacagagtctccctctgtcacccaggctggaggcacctgccaccatgcctggctgtgtgtttatatatttcatatcatttcatttctgactttttagtaaaaaatgtataaaagatacaggagtggctgggcgcggtggctcacgcttgtaatcccagcactttgggaggccaaggcgggtggatcatgaggtcaagagatcgagaccatcttgaccaacatggtgaaaccacatctctactgaaaatacaaaaattagctgggcggggtggcgcctgcctgtagagtactaaaaaaaaaaaaaaaaaagatacaggagttagtgaaatcatcataaaagaatccttttttctttgactcgatttcattttcttttctttttttttttttttgagtcggagtctcgctctgctgcccaggctggagtgcaatggcgtgaccttggctcactgccacctctgcctcctgggttcaagtgattctcctgcctcagcctcctgagtagctgggactacaggcgcctgccaccacgcccggctaattttttgtatatttagtagagacggggtttcaccgtgttagccaggatggtctctatctcctgacctcgtgatccacctgcctcggcctcccaaagtgctgggattacaggcatgagccaccgagcccggccaatttcattttcttttttttttttctttttgagagggtgtcttgctctgtcgcccaggctggagtgcagtggcgcattcttggctcactgcaagttctgcctcccaggttcacgccattctcctgcctcagcctcccgagtagctgggactacaggcgcccgctaccacgcctggctaatttttgtattttttttagtaaagacggggtttcaccatgttagccaggatagtctcgatctcctgacctcgtgatctgccagcctcggcctcccaaagtgctgggattacaggcatgagccaccgcgcccggccttcattttcttaaataactattttgttgtttttactttttagaatttgttgtcctcgttatggagaaagaagacaaacagaaagcgactgggggaaacgctgtgtggacaagtttgacattattgggattattggagaaggaacctatggccaagtatataaagccaaggacaaagacacaggtaaatattgccacaaaattttagatgtcagaatgttaacaatttagcaatactaatatcttaagtggatttagcaaaagtaaattctgaggtgttttgtttgtttgtttgtttgtttgttttttgagatggagtcttgctccccaggctggagtgcagtggtgcagtctcaactcactgcaagctccgcctcctgggttcacaccattctcctgcctcagcctcccgagtaactgggattacagaccgtgcgcaaccacactcgactaatttttgttttttttttttttttagtagaaacagggttccactatgtcgtccaggctggtcttgaactcctgacctcaagcaatctgcccacctcggcctcccaaagtgctgggattatagatgtgagccacggcgccaggcctttttttatttttattttttgagacggggtcttgcgctgtcatccagtctggagtgcagtgagtggatcaatctctgctcactgcaggctctgcctcctgggttcaagcgatgcctctgcatcagcctcccgagtagctggggttacaggcatgcaccaccacacccagctaatttctgtatttttagtagagatggggttttaccatgttggccaggcagtcttgaattccaggctggtcttgaactcctaacctgaaatagccacccacctcagcctcccaaagtgctgggattacaggcatgagccaccacgcctggccaaatttttagttctagttttgtctccaaaagttattgagtagatcaaaggtttccaaaagaatactataattataacttttaaaactctccagctgggtgtggtgagtcatgcctgtaatttcagcactttgggaggccaggtgggcagatcacgaggtcaggagattgagaccatcctggctaacatggtgaaaccccgtttctactaaaaatagaaaaaattagccaggcgtggtgccacacgcctgtagtcccagctactcaggaggcggaggcaggagaatcacttgaacctagtaggcggaggttgcaatgagcggagatcgcgccagtgccctgcagcctgggtgacagagcaagactccatctcaaaaacaaaaaattcaagtcttaagaaaaaaattaaagccaggaaagggaatataaaatttccttttttgtttttttattgagaaggagtctcactctgtcacccagggtggagtgcaatgatgcgatctcagctcactgcaacctctgctcaccgcaacctctgcctcccgggttcaagcaattctcctgtctcagcctcctgagtagctgggattacaggcatccaccaccacgcccagctaatttttgtattttaatagagacggggtttcaccacgttggctaggctggtctcgaattcctaacctcaggtgatccgcaggccttggcctcccaaagtgttgggattacaggtgtgagccagtgcgcctggcctagagtttactttttaaaggtgtataagtatctcgtgtaagcattaaagtaagcactaagtttgtcttccagagcaagggcatatattgctggttcacaatagtggccaaaaatgctcattgataataacagtttacatttgttttggcaggagaactagtggctctgaagaaggtgagactagacaatgagaaagagggcttcccaatcacagccattcgtgaaatcaaaatccttcgtcagttaatccaccgaagtgttgttaacatgaaggaaattgtcacagataaacaagatgcactggatttcaagaaggacaaaggtactagcaaagaatcacatttttacagggtagactggtccaatctttgcctttctttttttttttctttctttctttcttttttttttttttgagacggagtcttgctctgttgcccaggctgaactgcagtggtgcgatttcaggtcactgcaagctccacctcctgggttcacgccattctcctgcctcagtgtcctgagcagctgggactacaggcgcccgccaccacacccagctaattttttgtatttttttagtagaggcggggtttcaccgtgttagccaggatggtctcgatctcctgacctcgtgatccgcccgcctgggcctcccaaagttctgggattacaggcatgagccaccgcgcctggccctttctttcttatttatctatttattttgagacagtctcgcactgtcgcccaggctggattgcagtcctgtgatgtcggctcactgcagcctctgcctctcgggtttaagtgattctcgtgcctcagcccccaagtagctgggatttcaggcatgcgccatcattccgggcttatttttgtatatttagtggagaggaggtttcgctatgttcgtcgagctggtctcacactcctgacctcaagtcatccgcccgcctcggcccctcgaagtgctgggattataggagtgagctaccatgactggcctcatgtgttttttttttttttttttttttttttttttttataaaataataagtgaatgaatggatatgatgcatgtatgcctttggtggaaaaactgaaaatatagaagaagaagaaaaagaagatggtagtggccaggcgcagtggctcacgcctgtaatcctggcactttgggaggccgaggtgggcagatcacaaggtcaggagatcaagaccatcctggctaacacggcaaaaccctgactctactaaaaaaatacaaaaaaaattagccggacatggtggcaggcgcctgtagtcccagctactcaggaggctgaggcaggagaatggtgtgaacctgggaggcggagcttgcggtgagccaagatcgtgccactgcactccagcctgggcaatagagcgagactccgcctcaaaaaaaaaaaaaaaagatggtagtaatttatctcccacttcctcccaatatactaccatccatggaaaaccactgaagtattaatacatttcggtatatttgcttttagttctttttgtttttgttttttttttgagacagagtcttactctctcacccaggctggagtgcattggctcgatcttggcttactgcaacctccacctcccaggttcaagcaattctcctgcctcagcctcccgggtagctgggattacaggcatgtgccaccactcccggctaatttttataattttaatagagaccgggtttcaccatgttggccaggctggtttcgaactcctgacctcaggcagtcatccacctcagcctgccaaagagcagggatgacaagggtgagccaccacactcagccctgcttttagtactttatgccatatctactgtatttattttaacaaagctgagattaaaggttatttcgtgttgtataacttgtcataagcaatttctcatatcattaacaaattttaatgtttatgcgtaaacataggtgaatccaaatttaccagtccctgttgagcaattagttgccaattttcagtttaaaaaaaaaataataggccaggtgcagtggctcacccctgtaatctcagcactttgggaggccgagtcaggttgatcacctgaggtcgggagtttgagatcagcctggccaagatggtgaaaccctatctctactaaaaatacaataattagctgggcatggtggctagcgcctgtaatcttcagctacttgggaggctgaggcaggagaatgacttgaacctggtaggcagaggttgcagtgagttgagatcacgccattgcactccagcctgggtgacaagagcaaaactctgtctcaaaaaaaaatcccaaaaaacataataacaatgccttgagtatctttctgcataaatctttgcattatgatttattttcattgtatagcatttttgatacagagttatttggtcaaatggattttcatatttaatgtcagattccttttaagaaaattagtatgtccagtgggtgtccatctcagtgtatcctccccaacattcagtatatcttttttttttttttttttttttttttttttaattttgagaaggagtctcactctgtcgcccaggctcgagtgcagtgatgcaatcttggctcactgcaacctccgcctcctgggttcaagtgattctcctgcctcagcctttggagtagctgggcttaaacaggcgcacgccaccacggccggctaatttttgtatctttatcagagacagggtttcgccatttggccgggctggtctcaaacttctgtccccagctgatccgcccacctcggcctcccaaagtgctggaattacaagtgtgagccactgtacccggccaagtatatctttttaaaaaattgtcatctgggctaggtgtggttgcttatgcctataatcccagcattttgggaggccaaggcaggcagatcacttgaagtcaggagtttgagccaagcctggccaacatggtgaaacccctctctactaaaaatgcgaaaattcgctgggcatggtgctgggcacttttaatcctggctactgggaaggctgaggcaggagaattgtttgaacccgggaggtagagattgcagtgagccgagattgagttactgcactttagcctgggcaacagagcaagactctgtctcaaaaaaaaaaaaaattgtcatctggataggttaagtatgatattattattttatatattattttaatttaatttttattttttgagacagtctcagtgtgttgcccaggctggagtacaacggtggtcatagctcattacatcctcaacctccaggctcaagcaatcctccatgcctcatcctcctgattagctggggcaacaggcatgcaccaccacatccagctgattttttaaatttttagtagaaacaggatctctctatgttgcacaggctggtctctaactcctgggctcaagcagtcctcttgccttggcctcctaaagtgctgggattacgaacttgggccaccgcacccagcgaatgtcattttggattatattccttatattttgggtcttctctatgttaccagttttatttactttctctccctctctctttctctctctctttctctctttctttcttttttttttgggacagagtcttgctctctcaccgaggctggagtgcagtgacatgatcacagctcactgtaactgaactcctgggttcaagggatccccctgactcagcctcccaagtagctaggactagacaccactcctggctggtttttaaaaattttggtagaaacaggattttgctatgttgcccagcctggtctttttgttttgttttattttgttttttttttgagacggcgtctcactcagttgcccaggctggagtgcagtggtgtgatctcgactcactgcagcttccacctcctgggttcaagcagttctcctgcctcaacctcccaagtagctgggattacaagtgtgtgccacaatgcccagctgttttgtgtttttagtagagatggggtttcaccatgtgggccaggctggtttcaaactcctgacctcaagtgatccacccgcctcggcctcccaaagtgctgggattacaggcgtgagccgccgcgcccggccatccttctctttttgaaattttttgtagacagaatcttgctttctcacccaggctagagtacattggtgcaatcacagcttattgtagcctcaaactcctgggctcaaatgattctcttgcctcagcctcccaagtagccaggaatacaggcaagcaccatcatgcctagctaatttataaatttttttgtggagatggtgtctcactattttgcccagtctggtttccaaagctcaggcaatcctctcacctcagcccctcacaatgtggggattacaggcatgagccactgaacacagccctaaatttgttgattcatttttctctcaatttttaatactatgattttctctttctttctttctttctttctttctttctttctttctttctttctttctttctttctttctttctttctttctttctttctttctttctttctttctttctttctttctttctttctttctttctttctttctttctttctttctttctttctttctttctttctttctttctttctttctttctttctttctttctttctttctttctttctttctttctttctttctttctttctttctttctttctttctttctttctttctttctttctttctttctttctttctttctttctttctttctttctttctttctttctttctttctttccttttttttttttttttgagacagagtcttgctctttttgcccaggctggagtgcagtgccgctgtcttggctcactgcaacctccgcctcctgggttcaagcgattgtcatgcctcagcctccctgagtagctggaattacaggtgcacgccaccacgtccaggtaatttttgtatttttagcagagttagggtttcaccatgttgggcaggcttgtctcgaactcctgacctcaagtgatctgcccgccttggcctcccaaagtgctgggattacaggcatgaactaccgcgcccagcctctttttttttttttctcaagatggggttttgctcttgttgcccaggctgaagtgcgatggtgcagtctcagctcactgcgacctctgcctgctgggttcaagcgattctcctgcctcagcctcccgtgtagctggaattataggcgcctgctatcatgcctggctaatttttgtatttttttttagtagagatggggtttcaccatgttggccaggttggtctcgaactcctgacctcaggcaatccttctgccttggcctcccaaagtgctggaattacaggcatgagccaccatgcctgaccagtactatgaatttcactaataatttataacacatttattatgatgtccctggcgtattgagtcccattaacttgtataaaaacctttacaaaatagtcgtcaattttatgtaacaaatgggcatggttgtgttacaaatacaacttcatttacagcaacaagcagcaggctggatctggtctaagctctgtaatttgctaactgacttaggtcattaaagtctagtaagacaggctgagcacagtggcttatgcctctgacctcagcattttgggatgttggggtggaaggattgcctgagccaaagagttaagagaccagcctgggtaccatagcaagaccctgtctctacaaaaaatgaaaaacattaactgggtgtggtggcctgtgcctgtattcccagctacatgagaggctgaggcggaagattcgcttgagcccaggagtttgaggctgtagtgagccatgatcatgccactgcactccatcctgggcaacagaatgagacgctgtctcaaaaaaaaaaagaagaaaaaggctgggcgcggtggctgacgcctgtaatcccaacactttgggaagctaaggcaggcggatcacctgaggtcaggagtttgagaccagcctgaccaacatggtgaaatctcgtctctactcaaaatacaaaaattagccgggtgtggtggcacatgcctgtaatcccagctacttgggaagctgaggcaggagaatggcttgaacccaggaggcggaggttgcagtgagccaagatagtgccactgcactccagtctgggtggcagagtgagagtctgtctttaaaaaaaagcctagtaatgcaacctggtcagggcacctgcccccatgaagaggtgagtagtccatatagtactagactaggaattgaaagattaattccttttttttttttgagaaggagtcttgctttgttgcccaggctggaatgcagtggcaccatctcagctcactgcagcctccagctcctgggttcaagtgattctcccacctcggcctcccaagtagctgggattacaggcacgtgccaccatgcccagctaatttttgtattttttttttagtcaagatgaggtttcattcaccatgttggacaggttggtctcgaactcctgacctcaagtgacccgccctcctcggcctcccaaagtgctggggttacaggcatcagccactgcgcccagccacagaagattaattcaaatattagctccgttgtttattattaggaaggactaattattcaactactcttcgtttcagtttcttcatctgtaaaattcaagggttttttctagagaacctgtggtcaactccaaaattatattaggacttgaggcattgttatttcagcattcttttttttttcttgcttttaattttttttcgtctttatgtaggtgccttttaccttgtatttgagtatatggaccatgacttaatgggactgctagaatctggtttggtgcacttttctgaggaccatatcaagtcgttcatgaaacagctaatggaaggattggaatactgtcacaaaaagaatttcctgcatcgggatattaagtgttctaacattttgctgaataacaggtaacatagtaaccaaataagattaagcactttcctcttctcctctgacctttttagtttcaaatggttaattggtattataattagacctaatagtgcagtattcacacactatttagtgatatttcctacgttcagtgtgggagaaacatacctgctcctttagctgttcttgagccttttctcagttaccagctttctgagtaaacattgatgtgcagttggtgattggccttttctgcctagtacttactcctaggttttaatagcgtaaacaaacaggaatctggttatgaacaggtgttaattcatcagaagtttttatcatttgctttcttcttttctgtttatttgcctatactgcattggtaatatcagatgtattatgcacactaggttttttgttttgttttttttttttgaagatggaatttcgctcttcttgcccaggctggagtgcagtggcgtgatctcgtctcactgcaacctccacctcccaggttcaagcgattctcctgcctcagtgtcccaagtagctgggattataggcgcccggcaccatgctctgctaatttttgtattttcagtagagatggggtttcactatattggccaggctgatcttgaactcctgacctcgtgatccacccacctcagcctcccaaactgctgggattacaggcatgagccaccgcacctggcatactagtttgtttgtttgtttgttttttgaaacggagtcttgctctgtcgcccaggctggagtgcagtggcgcgatctcaccttactgcaagctctgcctcccaggttcgtgccattctcctgcctcagcttcccgaatagctgggactacaggcgcccgccaccacgcccagctaatttttttgtatttttagtagagacgtggtttcaccatgttagccaggatggtctctatctcctgacctcgtgatccgcccacctcggcctcccaaagtgctgggattacaggcgtgagccaccacgcctggccggttcagttttatctaacagacattatctatataggaacatggaaagattatgacacatttcccctctttatggtgtagaataaccaatcttgcatggttacctgggactgtcctggttttagcagtaaaaggctcacatgcgacgattgaacactggaactcaaaacttttgcaggagaaataaataaattactcaattcagtaaacatttattaaggtcaattttttttcactttgaatttgagagtatctggaaaggtgtaaccttgagggatgaataagaatttatctgaaaaactgacagtgggtgggtgatcaaatttctaggcagaagcagctgcatgcacaaaagtacataaacatgaaaataacatgttatgtctggaaaactgtaaacaggtcagtatttctagagcaagaagagggaagcacataatggccaagagatgaagctggatagttacatagagcccacttatggatcttgcatgccccactgaggaacttaaactttatctgtatttgacagggatcagcatcacttgaacccaggaggtagaggttacagtgagccgagatcaatccactacactccagtccaggtgacagagcaagactccatctcaaaaaaagaaataatcttagactgagtctcactctgtcgcccaggctggagtgcaatggcaggatttcactgcaacctccaactcctgggttcaagcgatgctcctgcctcagcctcccaagtagctgggattacaggtgcccaccaccacgcccagctaatttttctatttttagtagagacgggatttcaccatattgaccaggctggtctcgaactcctgacctcaagtgatctgccccacttggcctcccaaagtcctggtattacaagcgtgagccactgcgcccggccaaaagagtatttctttatgttgctttctctgactcataattcccagtaaagttggaagtgggtgactctacatctatagtaaataatgcattaagaacttaatagctattagcttgcaactttctggcctatagtataatatactttctgctgttccctttactcctccatgaggagatgtctcaaagcagggaataattgcagctccgtttggtgtcctctctggtgggtaaggcctcttttggttcctgaccttccagagtcagaaagctgatgaggttccagactaaattgaatttcctcctcaggttgctaagcaggatacaggaatcctgtggtctagcctgatccatccagcctcttcccttacccatttagctctgtctactcagacctgtgggtgagatggcctggagaaaatggtgaagggtcgtcagctgggcaaggaagagagcgaacaggtggcaagagagagagaagagcagagttggattccaaatgagaccaaatcattttatatagaagagagacacagtcaatcttctgttttggaaaggtcaccaaattatcagtttatgccgataaactggaggcagagagaccctctaagaacttcgtaataaatggtcagtgctggaaataacccagacaccactagtagggatggactcggtagatctgtagactttggttgagtgagtgtatggtagataatgaattagagaaagtaagataactcacaggtttctgacttgaaaaactagctagatgggtggcactactagtcaatacaaggaagatggaagagtaggatggatggagtaacaggcaaatctcttttgaatatgtcttttatatatccagggtagtgatatttaatagcatatggtcatttgggaattccaaactaccaatacagagttggtagttacagaacatagaaaagatgtcagaaatgtaacccaagagagatggtcagagagataggaagaaaataaggaaaatatgaatgcaagataggcaggtttaagaagggagtggtgattgatgtcagatgatgcaggcaaattataagagaatctgaaaattaaaaggtcagtagtgataattagtgtggagtaaggggttgagtagcacagttaatgggaaggtactggtagggggtgtctttaatttttaattttaaggatggcagagatttgaatatatttaaatgctaaggggaggccaacgtggtggctcacatgtgtaatcctaacactttgggaggctgaagtgggcaggtcacttgatgctaggagttcgagaccagcctggccaacatagcaaaattctgtctctactaaaagtacaaaaattagctgagcttggtggtgcacgcatctaatcccagccacgtgggaggccaaggcatgagaactgcttgaacctgggacacagaggttgcagtgagcagagattgccaccactgcactccatcctgggtgacagaacaagaccctgtctcaaaaaaaaaaaaaaaaaaaacgctaaggagaaagaaaatctataaaaagggagcagttgaagatttgggggccaggcgcagtggctcacacctgtaatcccagcactttgggaggccgaggcggacggatcatgaggtcaggcgttcaagatcatcttgtccaacatggtaaaaccccgtctctactaaaatacaaaaaattagctgggcatggtggcgcatgcctgtaatcccagctacttgggaggctgaggcagcggaatcacttgaacccaggagacagaggttgcagtgagctgagatcgcgccactgcactccagcctggcaacagagcaagactccgtttcaaaaaaaaaaaaaaaaaggccaggcgcggtggctcacacctgtaatcccagcactttgggaggccaaggcgggcagatcacgaggtcaagagatcgagaccatcctggccaacatggtgaaaccccgtctctactaaaaatataaaaattagctgggtgtggaggtgcgtgcctgtagtcccagctactcaggaggttgaggcaggagaatcacttgaacccgggaggtggaggttgcagtgagctgagatcgcaccactgcactccagcctggtgacagagcgagactccgtctcaaaaaaaaaaaaaaaaaaaagatttgggaaagaaccaaaataatttaaaggagcatatttctagaatagatgggatcaaggccacagatggagggattgattatccttggtcaagaaaagagattgacatgctttttatgtaccattgaccgttgaacaacgcaggtttgaactgtggcatgtccacttatacacagattttatccaaccaaaaacaaataaaaaacagtgtttgcagtatatgcaacctgtttatatggagtaccagtgtttcatatatgcaggttctataaagcgtactgcaggacttgagtttgcttgaattttggtatatgtgggagtcttggaaccaattgctagatatactaagggatgactgtaattaaaaggaaagaggaaagtaaaattatagatggaagtaagtttactggtaaaaggtaggatgttaaggacctctcacctaatgactttaattttttcactgaaaaaggtcatttactaagtaagtgtaagagggtaggggatggattagagcattaaggagaatgccagaggtctgtaatgacagccatgttgaatggaagttgctgattacagacaagtaaaaggactaaccagcagcattcaggaattaacagagagaggaaatcacacattttgcagtgacaccatacaatatgattatatgattttttttttttttttttttttgagatggagtctcactctgtcaccaggctggaatgtagtggcgctatctcggctcactgcaacctctgcctcccggttcaagcccttctcctgcctcagccttccgagtagttgggaatacaggcgcatgccaccacgcctggctaatttttgtatttttagtagagacggggtttcaccatgttggccaggctgggtctcaaacctctgacctcaagtgatccacccacctcagcctcctaaagtgctaggattacagacgcgagccaccacgcctggccaattatatgatttttattctttacacttgtgttcagctctctaggtagagcagaaaagacagattttctaatgatccagaattagggacttagggattagctatatcacaagctaaggcaacgaggaagacaatagtttggttaattaaccaaggggtccaggtaggcaagggaaggaagtattacgtgaaagagggctgaactgggagtgagtggaggcactgtgtacttgaagttcttctcaaaaggcaaaaatgttaaaccatggtctcagaaaggattctccagatatttctatattcaccttattcctttgagacaggacataaacaatatgatggcacttcttttgtattgtattttattttgtttatttacttattttatattttattttttgagatggagtctcactgtgtcacccaggctggagtgcagtggcacaatctcagctcactgcaacctccgcctcccaggttcaagcgattctcccacctcagcctcccaagtggctaggactacaggtgtctgccgccacgcccagctaatttttgtatttttagtagagacagggttttaccatgttggccaggctggtctcaaactcctgacttaagtggtccgcctgcctcggtctcccaaagtgttgggactacaggcgtgagccactgcgcccggcctgttctattttatattgcaaaaagttacaagtacttccacacttcatactgagtcaccttaatggtttagttggaaggaaaagtgggagtcagtaaaagtgctatcagcggccgggcgcggtggctcatgcctgtaatcccagcactttgggaggccgaggcaggcggatcacctgaggtagggagttcaagaccagcctgaccaacatggagaaaccccatctctactaaaaatacaaaattagccgggcgtagtggcacatgcctgtaatcccagctactcgggaggcagaggttgtagtgagccgagatagcgccatcgcactccagccttggcaacaagattgaagctcagtcttaaaaaaaaaaaagtgctatcagcaggttctgtagcagactaaattcgtttaataaacatttatttagtacctagtatgagccaggcaggaaatatgttagatgctggtgatattcaggtctacactgatttctgtaactatatatccatttccattttgactttcagtcctactatgtgccttgaatcttacataatttcaggctttcagagtaaggatgccaagtaatttgaggaatcatctttgtcttaatataagttaactatttcttgttgcttttctcacaatttgcttataaattgaacttaatgtaatggtgtttggggcaagtggataaggtacctttaacttcactaggaataagcattgatttaatgtagaagtttgttgctagtagttaccttgttttaatattgtcacatgtccatattttggggagcacctcttggcctcttttctgtactacatgttgagtatcccctgtgcttgagacgagaattcttttggatttcagattttttttagattttggaatatttacattatacttactggttctgaacatccaaaatctgaaatgttccactgagcatttcctttgagtgtcatgttggcactcaaaaagtttcagattttgcttcagacggcggggggagaaggttctgaaaaattttggatttcacatttttggatttggatgcacaatctatatctcacttttttgcctgatctgaactattagacacctacaccagcttcctataagacagtgagctggcttttcatgtcccaagaagtagcaaggctgtaaatatgactaaacaggttacatgaatttagataaatatcattaatccaaagtagtcaataagtagttgttgggttttgcattgcccaccccctccaataaataaatagttttaaaatagattcccaacatctcgtcttgcagttttcaaaaatattccttcatgcaggaggagagagagcatcaggaaaaatagctaatgcttgctgggcttaatacttaggcgatgggtcaataggtgcagcaaaccaccatggcacacatttacctacgtaacaaacctcatgtaccctggaacttaaaaaaaaaaattcctttatatcactgtcaaggatagaatactgagcagaggccagtcatggtggcccatgcctgtactcccagccctttgggaggctgaggagggaggatcacttgagcacaggaatttaagaccagcctaggcaacataggggaactctgtctctacaaaaaataaaataattagctggacatattggtgcacacctatagtcccagctacttgggaggctgaggctggagaatcacttgaacctgggagatcatcaaggctacagtgagccagggttacaccattgcactccagcctaggtaatagagtgagactctgtctcaaaaaaaaaaaaaaaaaatcagcagagtgaaacatggttgggatctccttgaagtgattctcaaagcctgattctcaggccagctgcattggcatcacgtatgggcctgttagaaatgcagattcatgagccatgttctactgagtcagcatctctaagaatggggcccaggaaactgggtttctttgcttgttttttcagagatagggtcttgctctattgcccaggctggagtgcagtggcctcccaaaattctgggactacaggtgtgagccaccatgcccagactgttggccctcttaagtctttctcaatctagagcaaatcatttcttttttttcccaacaataagtatttaatctagcacgttctaggtactgttgtttaccatgaaataaatttagctaaggagtcaaattcagaaaatgtaataatagtttttttttgttttttaagtgtaaggcattataattgaagtagtcaaaaaaggtttaattagggggattgagtgttaagagtagaagtaatcatgaactgggtattgtataaaattttttaaaaagaaagagaaaagagtagaacaaagagagcagaagttaaaatttatttttgtaattcctttacccctaacttggcgcatgacttttcaggtgtattttggaggccactgctatggcttatgaaaataattgttttttgttttacagtgggcaaatcaaactagcagattttggacttgctcggctctataactctgaagagaggtaaggcattaattaaaattacatgtgggaaataaggtttgttttgttttgtttttttgaggcaggatcttattctgttgctcaggctggagtgcgtggcttgatctcagctcgctgcagcctcaacctctgtgggctcaggtgattctcccaccttagtctcacaagtagctggaaccacaggtgggtgccatcacacctggctaatttttgtatttttagtagagacggggttttgctatgttgcctaggttagtcttgaactcctgggctcaagctgtctacctgcctcagcctcccaaagtgccgggattacagacatgagccaccgcacctgggcaacaatctctctcttttttttttttttttttttttgaagacggagtctcaatctgtcacctgggctggagtgcagtggcgtgatctcggctcactgcaacctccgcctcttgggttcaagaaattctcctgcctcagcctcccgagtagctggtattacaggtgcccgccactacgcccagctaattttttgtatttttagtagaggcggggtttcaccatgttggccaggctggtctcaaactcctgacctcgtgattcatctgcctcagcttctcagagtgctgggattacaggcgtgagccaccactgcgtccggccaagaatcttttttattcctagatgttctagtattctgcaagttgcaacaactgtcagagttccctaattatctgaaagcgttatcacttacattttaggcagcaaattttatctaaattcttgaatcgtcccttggctggaataaataaattagaatggaagttatttttttctctcttctcttctcttctcctcctttttctttttttttcctggagatttgctcttgttgcccaggctggagtgcaatggcacaatcttggctcactgaaacctctgcctcccgggttcaagcgattcccctgcctcagcctcctgactagctgggattacaggcatgtgctgccatgcccggctaattttgtatttttagtggagatggggtttctccatgttggtcacgctggtctcgaactcccgaccttaggtgatctgcctggcttggcctcccaaagtgctgggattacgggcgtgagccaccgtgcctggccttttttcttttttttttaataggccaggcgtggtggctcacgcccgtaatcccagcactttgggagaccgaggtgggtggatcatgaggtcaggagatcaagaccattctggctaacacggtgaaactctgtctctactaaaaatacaaaaaattagtggagtgtggtggcgggcgcctgtagtcccagctacttgggaggctgaggcaggagaatggcgtgaacctgggaggcggagcttgcaatgagccaagatggcgccactgcactccagcctgagggacagagcaagacaccgtctcaaaaaaaaaaaaaaaaaaaaaaaatgagatcttgctgtgttgaccaggctggtcttggactggcctcaaatgattctcccctttaggcctcccaaagtgctggtattacaggcatgagccaccacgccaggcatggaagttatttcttcatctcctacttctgaacagtttgcttttggagtgttaggttgctctggatttgtttttcagtctcatcttcatttggcacctatttctatttgcatttagttatgtgaatatttttcatcagaagccactgtaagtttatgtcatggttgttttttatatttcagtcgcccttacacaaacaaagtcattactttgtggtaccgacctccagaactactgctaggagaggaacgttacacaccagccatagatgtttggagctgtgggtaaggttctgttaactttttcttttgtctgtaacttacatactgttgacttgtactttgttttctctgtacactggctttttagagctcttcttaagttcagaaggatggcgataaacttttggccagatttccgggaaatctgttgaatatttcttaatgtcagagaccctttttttaaaaaacagatttcttctttttttttgtttaaactttgtttgaattgagatccaaataagatacccaagtaaggttcatagcttgcaattgattacatcaaatcttttaattttacattccccttctgtgttacctaattttgatttattttgtttccttataatttcattagaagaaactatttcacttgtcctatccagccttttatagtctggatttcgcagattgtatccttgtgatgatatatatgtattttttagcatgattttttatctttttgttgtttgagatggagtctttctatgttgcccattctggagtccagtggctgttcataagtatgatcatagcacgctatatccttgaactcctgggctcaagcaatcctcctgcctcagcctcctgaatagctgtgactacaggcgtatgttgccatacccagcttatcttttttacttttagcaaattgtaaatggattaaaggttgattcctaaccacccacccagggtcagggtagtagaccctgaaactactttacagtttgttttgagtacttctaacaaaagttatataataagtggtacatcagagttggaaggtggggagcagtgggagcctctgcccagagagtacaagcagtaaatgagtatgttgtctgtggagaattttgaaacaacaaaacaaaacaatccagtacaaactagtcagctttttattatggccttattagggcagttctaaatgagcagatttatacacacataccactttacataatacgtaattgtctttttttgggatgttaacagttacttggccattgcccacatctgttaattaatttgtggttattttatgatggtcacattctaattatatcatttcttattggaatacttatataaagatatcctcccatctgtttggctgaactcaggtctaaataatatagaaaaggtaggataaaagttaattctttcattttatataacggttttcaaaataatgaagtagtttcctagtatccttcaaagatgaccaatgaaaaatgtttttgttttttggttttattatgaattcttggatttaaacttatttcatgtattttaatccattgtggttattatccttattcttgttcaaactgtccagtctttggccagtgggagcttattcaggttatattttgagtccttttggcacaccatagtagtgttacagtagaaaacatcttgtttttggttccaagcttgtcctgttcatttcctgccccaaacctggaatcatccatttctctaaggagtcttagttccttttactggaaaatgatatttagaaactacagtttgtgtgttggggcatggatgttttaaattggccatgtttgttaattgtatcttatgttgtatgatttatgcccagtcacacactgtccttgacctttatactttacaattctgacatatatacttcccagtggagcaaatcacttctttccattcttttccttcctctattaatgtcagtctttaagaggagcactacaggggttttattttaaaattcaacagaatgatggagaaagagcataatttctgtggtagcctacccaaataaaataaagctttagttaaattttactgactcaagctgggtgtgtttttgttctggacaatttgctttaacagtattagcatttaaattgtcacaactaggctctaaagttaacgccccattaagatgcacgaggaaagttcatagctctgttcggtactattatttcagtctgtgcagcctgccacctcagagcagtagcaaagtgttgattacataatgaagatgtcttcccaccaaaggactggaaaccaaaagaaaagaaaacagaaaaacacaattggaaattaaaactacataaagttagacattcttcaaagcccagtggctcattgaattaagattttgtttgagttttgatgtgaacttactactttggtgattcatggtagtctctctgaagatatttttatgggattttttatagagaattggtatgacagttcagtgtgcaaattagaatcgaggagaaactagaaagactagtacagcaaattatgtcaggagtctgaaaacctagtggtttttttttcttcttttcttttttaaatgtctctgattttacccgctgtgacgacaacattgcacttagaacttgatgtggcagttaatgttgaaaacagaattaaattttactttttttttctttttatagagttgggatctcactacgttgcccagcctggtctcaaactcctgggctcaagcaatcttcccacctcggcctcaccaagtgccaggattacaggcatcagccactgagcctggcctaaattttattttcacttttccatctctgaatagggtttgagagaatataggaagtaagaatttgtctttgaagttgttttaacataattcgtttaaaggtccaaattctaacagaaaagtgctacttaaaaagctaggttcgttttgctttctcaaattaagtcaaactaaagaattttaaaataaaagtataaatttggttttgtatttgtctcatttcaaagcataggtcagacagattcatcgacctttttttttctttccccactttaaaaaaatgaaaaatttcaggcacgtaacaaaaagtatgggatattcatgtaatctttgagatgtggtcttcctatgttgccaggctggtcttgaactcctggcttcaagtgatcctcctgcctaggcctcccaaagtgctgggatcacagacatgagctgccatgctcagcctttattttattttgaaataatttcaatgtatggaaaagttacaggaatagtacagaaaactttagtatagccttatcaaattcattcaatatttaaacctattttattgaagtataaaataaactgcatatattttgatatgttttgacataacatatccaccagtaaaaccatcaacacagccaagataatgatcacccaccacagtttccttgtgcccttttgtaatccctttcctctacccgtaccctcccattcccaggcaaaccactgttctgcattctgtcactataatttctatttctagaattttacacaaatggaattatatagtatatactccccccactcttttaatcagcataaatgatttgagatttattcatgttagattcactagattctattaaaaatacaaaaaaattagccgggtgtggtggtgcatgcctgtagtcccagctacttggaaggctgaggcagagaatcacttgaacctgggaggcaaaggttgcagtgagtggagatagcaccactgcactccagcctgggtgacagagtgagactctatctcaaaaaataaaaataaaaaaagtccaactgatcctagctgatgacagtaaattattttatttgaaatacagtgccaagaaggctatagtatagtgcatcttctacagagcagattaatgacaaaaatgaattcaaactttatagaaactaactgcagagagcatccttgtttatttattttttgttagtattgttctttaattttgagcaaccttgtaaaattgtctttagttatttccttaattacaatggcatgatagaaaaagactcttgactccctttctctgatcatagagtgtccttaataggtggcaaaagtttgatctgctggcaaatttaaattctttatactgtctgtttcactgcaagaaatattttctctttggaaactcagacactgaaatttggggctatttatcttggttgcaatccgacatatcaataatgtaaaaattttttgagacactttaaataggctctaagaatttctcttctgacctctcaattttaccttttctagatgtattcttggggaactattcacaaagaagcctatttttcaagccaatctggaactggctcagctagaactgatcaggtacagctgtacatgtgctcttgagtgcccaggtgtgataggtattctcatcctccagtttctaacactttctagtcattctgaatgagtttatgtttcttatgtccaagtaagtttctctttactcagtcaggtttaccatatattttgtcataggctatacatataaagaagttttatttcacctaatttttagatcttactttgcatattttttattagctcttcatataaaagcataccattttggggatggctcttccattcatagctcagatgagattaaatttattcagcaaacatttattgagcctgttatacaacagattacttttaacattaaactttaggattcagagataaaaaataggtccccgccttcaaagaattcagagtttagtaaggtatatagcatgtaaatagttataaaatacaacctataatagaaaatatggggaaagcccaggattgggctggcatttgggtgggtttgtttttgttttgtttttttcaataaaattaaagggaagaatatagcaggctaatgttttttgtatttttttttttagacagggtctcgctctgtcacctagactggagtgcagtggtgtgatcatagttcactgcagcctcaaactcctgcactcaagtgatcctcccaccttaccctcctgagtagcttggactacacctgtagtcccagctatttttcgttcatttgttttgtagagatagggtctcattatgtttgttgcctgggctggaactcctgggctcaaacagtcctcccaccttgacctcccaaagtgctgggattacacacgtgagccaccacaccagcctaatgcagacttttttttttttttttttttgagatggaatcttgctctgtcacccaggctggagtgcagtggcgtgatcttggctcactgcaagctccacctcccaggttcaagccattctcctgcctcagcctcccgagtagctgggactacaggtgcccaccaccacacgcggctcatttttttgtatttttagtagagacggggtttcaccatgttagccaggatggtctcgatctcctgacctcatgatccgcccacctcggcctcccaaagtgctgggattacaggcgtgagccaccgtgcccggccaatgtagacattttttaaaggtgataaaggtgatatttttgttgttgttatttggtaaactgttgattatctctcaaaattttcagtcttatactctcttctcatctcacagtttaccctatagggatactataggatcatcttagccctttgtaattactactaactgaacagaacaaaactggtaataaaaacctgtatggggggattaaaacatttcacaaatccaaataatgtggatcatttaggattattatccgagtattttttctttcctctgttataaccagttctttctgttctctgcctttctgcccttaaagcagtaatgtcatattttcctttctgcatgccctgtaatgtaataaccaaagattccccagacctcaggaggtaataatttctgcttctgaaacctccggaattcatgatgttgactcactcactccattgttcttgcttttgctttgttttcagccgactttgtggtagcccttgtccagctgtgtggcctgatgttatcaaactgccctacttcaacaccatgaaaccgaagaagcaatatcgaaggcgtctacgagaagaattctctttgtgagtttggggaaaatgaacatctcgtttctgtgtctggctggtgttgggacttggctttttcctggtctgggtagttaatgttgtcccagtttatcatggcaacacagtgtaggaaaacattttagtttcgaacagtatatgagttttatcatagcccttttgtaattttctcttctgaaggctttagacaatagaaaaccattttattttgaacaatatataaattttctcatagccttcttgatctttccatgagaaaaagagaatggaattgttggcttcatgggttttgtttgtttgttttttaaattgagacagggtcttgctgtgttgtccaggctggagtgcagtggcacgtttagggctcactgcagccttgacctgctgggctcaagcaatcctcccaccttagccttcattttttttttttttttttgagacagagtctcactttgccacttaggctggagtgcagtggcatgatcttggctcactgcaacctctgccccccaagttcaagtgattctcctgcctcagcctcccaatgtagttgggattagaggcctctgccactgcacccagctaatttttgtatttttagtagagacagggtttcagcatgttggccaggctggtcttgaactcctgactttgtgatccacccacctctgccttccaaagtgctgggattataggcgtgagcctctgagtccggccccaccttagccttctgaatagctgggaccacaggcacccgccaccacacctggcattttttttttttccgtgtagagatagggtctcctaatgttgcccaggctggtcttgagctcctgggctcaagtgctcttcctgcctcagccccccaaattgctgggcttaaactttgagaggctgaggcaggaagatcactcgtgctaccacgcctggccatgttttggttttgttttcttcttacttttttccctctctgttattttattttactttttttaactttaatagatggatagaactggccatatttttgtgtgtgtcacccaggttggagtgcagtgacgcgatcttggctcaccacaaccttcgtctcccaggttcaaggaattctcctgcctcagccttccaagtagctggaattacaggcacccgccaccatgcacagttaatttttgtatttttagtagagatggcatttcaccatgttggccaggctggtcttgaactcctgacctcaagtgatctgcccacctcagcctcccaaagagctgggattataggtgtaagcccaccacacctagccagaattggccatattttttacttgtgttatagcacagcatttctcgtttgtttgtttttgagatggggtttcgctcttgttgcccaagccagagtgcagtggcatcatctcggctcactgcaacctccgcctcctgggtttaagtgattctcctgccttagcctcctgagtagcaaggattactggcacgtgccaccacacccagctaattttttgtatttttagtagaaacggggtttcaccatgttagccaggctggtctcgaactcctgacctcagattatctgcccgcctcggccccacaaagtgctgggattacaggcatgagctactgtgcccggcccagcatttcttaaatcctgtgtgggagcaaatctgcttgcttgtgttagccaacctccagcttgctttctttggttttacatggaaattcaaagactttttttttttttttttttttttttttgagaccgtctcactctgtcacctaggctggaggagtgcagcagtgtgatcttggctcactgcaacctccgcctcctgggtccaagcgattctcagccctccaaggagctagaattacaggcgtgcatcaccatgcctggctaatggggtttcactatgttggccaggctggtcctgaactcctggcctcaaacgatccacccgcttcagcctcccaaagtgctgtgtgggactgtaggcatgagccaccattgcacatcctttttttttttttttttaaaaagagatgggctcttgctctgttgcccaggctgcaatgcagttgtgcagtaagaactcattgcagcctcaaattcctaggctcaagtgattttccaatgtcagcctcccaaatagctgagactacagggtgcacagcattgcacccagctaattaaaaatatatatatatttgtagacatgaggtttcagtatgttgcccaggttgatctcaaacttctggcctcacgcagtcctaccttggcctcccaaagtgctggaattacaggtgtgagaccctttgaaacaaaattacaaatttgagaactgtagggtcattgtgaacttgtcctttctgtgttcttttccatagcattccttctgcagcacttgatttattggaccacatgctgacactagatcctagtaagcggtgcacagctgaacagaccctacagagcgacttccttaaagatgtcgaactcagcaaaatggctcctccagagtaagtgctggtagccatgttgtgaccctaaatctttccctgggccttagacgatgagaaactcataaaagaaccacagatgcccagtaagacccaaatgaagaggtgtctttgagtattatggttgaggtttgttttttttgttttatctttgttgtttttttctttatataagtaatagatttagctttgatacttgttctaatttgactcaagctatcttcttttgtccctggatctccatcccagaatattgttgtgtagagcctctttgaaagtattccttttagatttttgtgggttggtttatttatttatttatttatttttgagatggagtctctgtcgcccaggctggaatgcagtggtgcaactcagctcactgcaacctctgcagggttcaagcgattctcctgcctcagcctcccgagtagctgggactacagacacacaccaccacacccagctaatttttgtatttttagtagagacggggttacaccttgctggcccagctggtctcgaactcctgacctcaggtgacccaccctggcctccgaaagtgctgggattacaggcgtaagccactgcgtccagcgtgtttttgttgttgttgttgttgttgttgttttgagatggaatcttgctctgcctcctccacctcccgggttctagcgattctcctgccttagccttgcaagtagctaggattacaggtgcctgccaccacacccggctaatttttttgtatttttgtttcattttgttttgttttttgagatggagtttcgctcttgttccccaggctggagtacaatggcgcaatctcagctcgccgcaacctctgcttcccaggttcaagcgattcacctgcctcagccttcccaagctgaaattacaggcacgtgccaccatgcccagctaattttgtgtttttagtagagacagagtttctccatgttggtcaggttggtctcgaactcccgacctcaggtgatctgcccacctcggcctcccaaagtgctgggattacaggcatgagccacagtgcctggccatttttttgtatttttagtagagatggggtttcaccatgttggccaggctggtcttgaactcctgcccatcttggcctctcaaagtgctgggatcacaggtgtgagccaccgtgcctggcctgtttgtttgtttgtgtgttttgagacggagtttcactcttcgcatccaggctggagtgcagtggtgtgatattggctcactgcaatctccgcctcccagtttcaagcaattctcctgcctcagcctcccaagtagctggaattacgccaccatgcccggctaatttttgtatttttagtagagacagggtttcatcacgttggccgggctgatcttgaactcctggcctcaggtgatccgcccgccttggcctcccaaggtgccgggattacagatgtgagctactgctcccagccttttttgttttttccgagacggagtctcgctctgtcgcccaggctggagtgcagtggcgtgatctcggctcactgcaacctccatctcctggattcaagcagttctcctgtcccagcctactgagtagctgggattataggcgcaggccaccacgcccgactaatttttttgtatttttagtagagacagggtttcaccatgttggccaaggtggtctcaaactcctgacttcaggtgatctgcctgcctcagcctcccaaagtgttgggattacaggcatgagccaccactcccagcctttttttttttttttccaattgtagaaatggagtctcacaatgttgtccagactgtctcaaactcctgggctcaagtgattctcccgcctcagccttccaaagtcatgggattacaggcaggagacacatgcttggcctccctctggtttttgctcttaaccattcctccagctgtaatcatgcatgtctctggtgaccatgtatatctcacacttgcagagatagtcccagttttttggggttttttttgttattattttttttgagacagagtttcactcttgttgcccaggctggagtgcagtggtgtgatctcgactcaccacaagcgtttcctgcctcagcctcccgagtagctgggattacaggtatgcgcccccatgcctggctaattttgtatttttagtagaaacagagtttcaccatattggtgagactggtcttgaagtcccgacctcaggtaatctgcctgcctcggcctccgaaagtgctgggattacaggcgtgagccactgaacccggccaacagtcccagttttaaatggtttgcatcactgccagttttttttgttgtttttgtttttttctgagacagggtctctcactctgtcacccaggctggagtgcagtggcacaatctcaactcactgcaacctccacctcccggcttcaagcgattcccgtgcctcagcctcctgagtagctggattacaggagcccggcaccacagctggctaatttttgtatttttagtagagatgaggtttcaccatgttgaccagacttgtctccaattcctgacctcaggtgattcgcctgcctcgtcctcccaaagtgctgtgattataggcgtgagctaccgcacccagccagattactgaattttgatgtaagaaataagatctttcggtcgagcgcggtcgctcacacctgtaatcccagcactttgggaggccgaggtggatggatcacctgaggtcaggagttcaagagagcctggccaacatggtaaaaccccgtctctcctaaaaatacaaaaaattaaccaggtgtggtggtgtatgcttgtagtcctggctactcaggaggctgagggaggagaatcgcctgaactcgggaggtggaggttgcagtgagccgagattgtgccagtgcattcctgcctagaccatagagtgatactccatctcaaaaaattaaagtaacataaaagaaatatgatcttttaatatgtctctatttaattaaaatcttatgaatgcctctgtattgtattggagcttcagagattcatatcccacattatagcacataaaaagtcttttatctggcctggcacggtggctcatgcctgtaatcccagcactttgggaggctgaggcaggcagatcacctgaggtcatgagttcgagaccagtttggccaacatagtgaaaccccgtctctactaaaaaatacaaaaattagccaggcgtagtggcgtgtacctgtagtcccagctactcagggagactaaggcaggagaatcacttgaacctgggaggcggaggttgcagtgaactgagattgcaccactgcactctagcctgggcaacagagcaagactctgtctcaaaagaaaaagaaaaaaaaagtattttatctttgaatttgtcagtgacagtattatagctttaatgtcaaattttggaggtcattttcttaagaaagactacatgtcttaaaaatggataggatgttagttcatgagtaggtagtaattctaaatctgattgctccaaagaaatgtccaaattcatttatttttttgagacagactcttgttctgttgctcaggctggagtgcagtggtgtgatctcggctcactgcagcctccacctcccaggttcaagcaatcctcctgcttcagcctccttagtagctgggattacaggcacacaccaccacacttggctaatttttgtatttttagcagagaccaggtttcaccatgttgccaggctagtctcgaactcctgacctcatgatccgcctgcctctacctcccaaagtgctgggattacaggcatgagctgccgcgcccagccaaattcatttattacactagaatgttgatacattgaatatgacttgaaacatataagggttttactgaaatttgggaactcctattatagagagatttatagtaagatttgacctacttggtctgattgtatgagagattctggactaagttatacgtagtgctgaactccacagatgagcaagttgatatccagtcatagaaattctgtgggcagaaaggggaaagaactagtctttggtcctcacaaaccaaattacacataagttgattttgcacagagatgttttgatcatgatacatggttccatggtttaagtcaccgcctttcctcgaccttctgtatacattaacaagccagccattactgtcctcgtctttattccctactgaaacttgaccaatactgttctccttttttgttgttatgccaaggaaagacagtatttatatgggaatttatatagctggtctgtacctagtattagcaagatcctcctttctcactatgtaactttcgtacttttatttcctcagactaccatctgccatgatttattttacactgctgttacctacttttactaacttttttggttatttttgttttccttattctttacatttcccacagtctttgccttcccattttaatcctttgctcctccattcattcactgctgcattcccttacatatttcccctttgctttgtctttttccagcctcccccactggcaggattgccatgagttgtggagtaagaaacggcgacgtcagcgacaaagtggtgttgtagtcgaagagccacctccatccaaaacttctcgaaaagaaactacctcagggacaagtactgagcctgtgaagaacagcagcccagcaccacctcagcctgctcctggcaaggtggagtctggggctggggatgcaataggtcagtgccagaatggggcctttgtgcttttgctaagcgtatttggcaggttttgaaggtcaagtgtaaggagtttgtgtgtgtgtctgttttttagtttttggtccagtgaaccattaggaaagaggttaatgtcctcattatggtgagaaggagattaaccaagtttcgtacatatggtccagaaagtctacaatagatcattttcctttcctgaaatatgtacggaacactgtatctcaattagatgtgtggcataaatcagtgaattaggtaagccaaatttaatttaaggttagttcacccatgactttatgaaacacataatttggagccttgtttatattagatttgataagaccttcatagaatctagtagtgttaaattacaattgctaaatgttgttctatagactgttattttgatctaaatgtatctgaaactatgtcatattgaactgttataacaaagtagttctcctgtgttatgaccaattcttcgggacaaaagatactctttttctggttcactttcccctcttcacttatagcagtggcttttaatactggctgtatattagaatcatcctggaagctttaaaaacaaatatgcctatacgattgcctatctctagggatgggtcctgaggcatctgaataggagagatttttaaatctctcttagtaattctgatgtataataaaggattgaaaatcacagaacttgaaaaatacagataaagtgaagtcacttttatgcacaatccagagatgttttagttattagtgcctgtatttcttaagcgaaagcataaagagtaacaaaatgtgtcatgacattttgaggcatgaaaaaatgagacatttaaaatgaaatttcattttttggatattgtaagttgctgttgccagttgaagaaggcaaagggcccttggcctatctcatcgtcttatattggcttcactgtctttcaacaggccttgctgacatcacacaacagctgaatcaaagtgaattggcagtgttattaaacctgctgcagagccaaaccgacctgagcatccctcaaatggcacagctgcttaacatccactccaacccagagatgcagcagcagctggaagccctgaaccaatccatcagtgccctgacggaagctacttcccagcagcaggactcagagaccatggccccagaggagtctttgaaggaagcaccctctgccccagtgatcctgccttcagcagaacagacgacccttgaagcttcaagcacaccagctgacatgcagaatatattggcagttctcttgagtcagctgatgaaaacccaagagccagcaggcagtctggaggaaaacaacagtgacaagaacagtgggccacaggggccccgaagaactcccacaatgccacaggaggaggcagcaggtaaacagaccggtcatgaatctcattgagctcaggtgctgttgataccctcttaaaaatctcttaacattttttttcccccacatcaatggccttggtttcagttattctgtaacctagtctacaggagaacatagcaccaagtaatgtatttcttgcttggcttcttttatttaagtctcaaagcttcccaaagcacctttcctatactgattgtttttccacctcctaggagataggtaagtaaagcccctgtgttctaaccaaggaaaccacaaccatagctagtgatgcatcttgaaccacacatcttgaactgtgtgtggtggccaactagtcctagcacttggaaatctgacttccaaacaaaccattatcagactatacttctttacctctagtggagtggatgctgaatgccagtctttcctggaagatacaatcaagaaaaccctaataaaatatcattgttaatttcctgaagaataatttgggaatatttctaagtagataattaacactatacatttcttttcccaaaaataatagtgtataagaacaattcctttaaatctgtttctgatagaagcaattgaatggaccccagatcaggaagtgcgtgtattataaagaaaaaaaaggaaaatggggataagttatacgttaatctcacatgaccatagcgtgcaatttattagagggaaaagcagtttaagttctttaattctgattcacactgtatttgcaaaatctttacttatgtaaaaatgtttttaactcctcggaaattctcactgtccatgaagaccccatgaattggggaataagaagaggctcgagggctgaagagatatactaatcttcaactttagggtcctacattcacatttcatatgaggtggtgcagaaagtatatgttttaaggcctggcctatggccagaagttgttggatttacttttcagaggaaagtgtagagatgccgtaactaattattgcagtcacccctggattattcagctgatgcctctacagtggctcacttgttcttgtttctcccctgctatctctatttggccatttcactgttaattagcacttccaccagagggcagactgtataaaccagagaaggtgacagcctattaattgggctgctgttttactattctgtacttactgggaagggtgataagttgaaatcaaatgagtaaaatgaagggttttgtttgtttatttgtttgtttttggaggcggagtcttactccattgcccaggctggagtgcaatggcatgatcttggctcactgcaacttccgtctcctgggttcaagcgattctcctgcctcagcctcctgagtagctgggattataggcatgcacctccatgtccagctaattttgtatttttagtggaaacgaggtttcaccatgttagccaggctggtctcgaactcccagcctcaggtgatctgcccgcctcagcctcccatagtgctgggattacaggcttgagccactacccccggcctgaagttttaaatttatttttacatttcaataatacatccttattgttgtcaatcctgaaagtccgtactttttttttgtttgttttgagacagagtctctctctgtcacccaggctggaatgcaatggcgcgatcttggtgcactgcagcctctgcctcctgggttcaagcaattctcctgcctcagcctcccaagtagctgggattacaggcacctgccaccacacctggctaatttttttttgtatttttagtagagatggggtttcactgtgttggccaggctggtcttgaactgccgacctctggtgatccacccgccttagcctcccaaagtgctgggattacaggtgtgaaccaccacacccagccaaaagtccatacttttaaggattgacaacattgatactttagatcataacaatatgatttataattcatatttttaattcctttaagaagtattaggcttactttaataagtttttttgtttgtttgtttttgagatggagtctcgctctgtcacccaggctggagtgcagtggcgtgatctcagctcattgcaaaccctacctcccaggttcaagcgattctcctgcctcagcctcctagtagctgggattacaggtgtgtgacaccaggcccggctaatttttttgtatttttagtagagacggggtttcaccttgttggccaggctggtctctaactcctgacctcaagtgatctgccttccttgttctcccaaagtactgggattacaggcatgagccaccatgcccagcctttgctactttggaatagaatttttattttacacatatgaaagaatttgacctcaagtgttagttctgttgaaacataattaggctatttacataaaaggcacagtttgaatacaaaaaaatggcatagctggaagaatgtaagtttagattatctcacttttacagttacacatttttaagttatttgacctcggtattaaaaatcctcgtgttccattttatgtgtagtccagaaatactttttaaataactggtacagtgatgtccttatatagagagtgttgaaagcaaaaggctctgaaatctatcattacttgtagtccagtttgccctcctttttcagcatgtctactctccatgttcaaaattttccatggctaattttttgtccttaaattcattttcccctgccaccctgtcaaccagccaatcagtcaacaaataacttgggtgggtactatacatagggtcaccaattcattcctgaactgtcccggttttaaagctgaacattgacaacctggaaaaccccctcagtcccagacaaactgggactgttggtcaccctgcttggatgttacatgtaacacctgaccatcttttgtactgtacaaccttacaattttgtagtgttttcagagtgctttcatctgcatgctaagggaatacaaacttaattactgattgtctttgcaaaatataattaaggtaaatatgctacaaaaatatctaattataactaaaaactgtttttggcttgttttgagtaatgactttacatcacagcttagataattgaagaatgactatatatatattttaaaatatgcttccatagggaaaagaaaaatcggtcatttggaagatatcccaaaacattaaatcttttcttcagcaggatgactctcaattttctaaaggcattgttctaccatacttctgtctcagtggttttctttgtcctcaaactcataccattttacatctctcctctcctgccttggcaggagttcattatcagacaatgtttatcatgcttaagcacatttaggcagcagtggaaaaaagaaagtctggtggaagtagttcaagaaagacaaaagatctttgtaaagacagagtatagtatgaatttaatatatttctaaatatttagttcttgtcaccgtctccaagataaacagatgtttatcaacagttcattctgcatgacactgctatagtgatttttttttcatagcatggaaaaaaatgcagtagttaggaaaacaaaatagaaaattatgatagaaattagtctttaaaattactgtaacataggaagctgaatgataatatggtagttacaatcctttcagactatgattttggggagacgtgactaaagtttggagaagcaagtgtatttttatacatgacagtaatgaaaactttttactttattttatctctcctatatattctttaagttttatttcaggttaacctatgtcatcaaacattctgtaaaatgtgttagccaagtccatgcaaggtctctgttgtagagcaagattatgtcctagaaatgtgaccacagcatgtatattgttccctctcatcttccttccttctgctttgttttaatgtttccatctaacagcaaaaaggggcagggagtctgccaacagcctgcatgttagaacagttctttaaaggaaggaaatggaggaaatcttagaccaaaatcaggataatcatttgaaacatatgatatttttacactagctgttagatccaggatgcaactgttttacttttaatcacttgatttatttataattgcaattttctgatcccaagattttattctttatatatctggttacttatattgatatttgtttatgttgcacagtgtgtgtgtttgtgtttataatcacatgtgctttttaagatggtgtttaaaagaagtaacccttccacagcatgtcctcctcacattcttccaccagagaagaggccccctgagccccccggacctccaccgccgccacctccaccccctctggttgaaggcgatctttccagcgccccccaggagttgaacccagccgtgacagccgccttgctgcaacttttatcccagcctgaagcagagcctcctggccacctgccacatgagcaccaggccttgagaccaatggagtactccacccgaccccgtccaaacaggacttatggaaacactgatgggcctgaaacagggttcagtgccattgacactgatgaacgaaactctggtccagccttgacagaatccttggtccagaccctggtgaagaacaggaccttctcaggctctctgagccaccttggggagtccagcagttaccagggcacagggtcagtgcagtttccaggggaccaggacctccgttttgccagggtccccttagcgttacacccggtggtcgggcaaccattcctgaaggctgagggaagcagcaattctgtggtacatgcagagaccaaattgcaaaactatggggagctggggccaggaaccactggggccagcagctcaggagcaggccttcactgggggggcccaactcagtcttctgcttatggaaaactctatcgggggcctacaagagtcccaccaagagggggaagagggagaggagttccttactaacccagagacttcagtgtcctgaaagattcctttcctatccatccttccatccagttctctgaatctttaatgaaatcatttgccagagcgaggtaatcatctgcatttggctactgcaaagctgtccgttgtattccttgctcacttgctactagcaggcgacttacgaaataatgatgttggcaccagttccccctggatgggctatagccagaacatttacttcaactctaccttagtagatacaagtagagaatatggagaggatcattacattgaaaagtaaatgttttattagttcattgcctgcacttactgatcggaagagagaaagaacagtttcagtattgagatggctcaggagaggctctttgatttttaaagttttggggtgggggattgtgtgtggtttctttcttttgaattttaatttaggtgttttgggtttttttcctttaaagagaatagtgttcacaaaatttgagctgctctttggcttttgctataagggaaacagagtggcctggctgatttgaataaatgtttctttcctctccaccatctcacattttgcttttaagtgaacactttttccccattgagcatcttgaacatactttttttccaaataaattactcatccttaaagtttactccactttgacaaaagatacgcccttctccctgcacataaagcaggttgtagaacgtggcattcttgggcaagtaggtagactttacccagtctctttccttttttgctgatgtgtgctctctctctctctttctctctctctctctctctctctctctctctctctctctctgtctcgcttgctcgctctcgctgtttctctctctttgaggcatttgtttggaaaaaatcgttgagatgcccaagaacctgggataattctttactttttttgaaataaaggaaaggaaattcagactcttacattgttctctgtaactcttcaattctaaaatgttttgttttttaaaccatgttctgatggggaagttgatttgtaagtgtggacagcttggacattgctgctgagctgtggttagagatgatgcctccattcctagagggctaataacagcatttagcatattgtttacacatatatttttatgtcaaaaaaaaaacaaaaacctttcaaacagagcattgtgatattgtcaaagagaaaaacaaatcctgaagatacatggaaatgtaacctagtttagggtgggtatttttctgaagatacatcaatacctgaccttttttaaaaaaataattttaaaacagcatactgtgaggaagaacagtattgacatacccacatcccagcatgtgtaccctgccagttcttttagggatttttcctccaaagagatttggatttggttttggtaaaaggggttaaattgtgcttccaggcaagaactttgccttatcataaacaggaaatgaaaaagggaagggctgtcaggatgggataatttgggaggcttctcattctggcttctatttctatgtgagtaccagcatatagagtgttttaaaaacagatacatgtcatataatttatctgcacagacttagaccttcaggaaacataggttaagcccccttttacaaagaaaaagtaaacatacttcagcatcttggagggtagttttcaaaactcaagtttcatgtttcaatgccaagttcttattttaaaaaataaaatctacttataagagaaaggtgcattacttaaaaaaaaaaaactttaaagaaatgaaagaagaaccctcttcagatacttacttgaagactgttttcccctgttaatgagatatagctagatatcggtgtgtgtatttctttattattctctggtttttgatctggccttgcctccagggccaaacactgatttagaaagagagccttctagctattttggcattgatggctttttataccagtgtgtccagttagatttactaggcttactgacatgctattggtaaatcgcattaaagttcatctgaaccttctgtctgttgacttcttagtcctcagacatgggcctttgtgttttagaatatttgaatttgagttattgggccccactccctgttttttattaaagaacgtgagcctgggatactttcagaagtatctgttcaatgaaaaaaagttggtttcccatcaaatatgaataaaattctctatatatttcattgtattttggttatcagcagtcatcaataatgtttttccctcccctctcccacctcttatttttaattatgccaaatatcctaaataatatacttaagcctccattccctcatccctactagggaagggggtgagtgtatgtgtgagtgtatgtgtatgtatgatcccatctcacccccacccccattttgggagtcttttaaaatgaaaacaaagtttggtagttttgactatttctaaaagcagaggagaaaaaaaaacttatttaaatatcctggaatctgtatggaggaagaaaaggtatttgttaatttttcagttacgttatctataaacatgatggaagtaaaggtttggcagaatttcaccttgactatttgaaaattacagacccaattaattccattcaaaagtggttttcgttttgttttaattattgtacaatgagagatattgtctattaaatacattattttgaacagatgagaaatctgattctgttcatgagtgggaggcaaaactggtttgaccgtgatcatttttgtggttttgaaaacaaatatacttgacccagtttccttagttttttcttcaactgtccataggaacgataagtatttgaaagcaacatcaaatctatacgtttaaagcagggcagttagcacaaatttgcaagtagaacttctattagcttatgccatagacatcacccaaccacttgtatgtgtgtgtgtatatataatatgcatatatagttaccgtgctaaaatggttaccagcaggttttgagagagaatgctgcatcagaaaagtgtcagttgccacctcattctccctgatttaggttcctgacactgattcctttctctctcgtttttgacccccattgggtgtatcttgtctatgtacagatattttgtaatatattaaatttttttctttcagtttataaaaatggaaagtggagattggaaaattaaatatttcctgttactataccacttttgctccattgcatttacttcttaatctgtaccccctgagcatatctaatcatgtataaaggacgtttttcctccactttatcttaggggttctctgtctcagaatcattatagactcattaactccccctcccagcaaaaggttatcaggatttgaagaggtgcttgaaaacgctagactaggaactagagaataaatgagttgggaaaaaccatgaaatgtgatttttttaaagtagaaaagttatacaaataatggtaccaaaccatcaaaagagttgagcttcatgtaccctgactcctcctgacaggagaggtaagtgggtttgagctcaactgtcatcaagggaagttggtaagaggctgtttagacccaaaggatagtcttaaaccagacttcaccacccaccctacctcagttcccatgttattacatgcagagtcagcatggggattagtgtacctacctttgctgagatttcccgatgcgttgccaatccagaaagtgaatcaaaaagttgtttaaaagttaaaatctctattgtttccaaaatctttcccatctccacctgaagacagaattgcttccccttctctttcatggcttagaacacaggataaatttgcccctgtggtatgtgctgcaatcctgctagttatgacaaatgggcagagggcagataaagtccactaggagaaagaaagaagggcgataggtatctgaagttgtaaatggggtgagcaagtcatacaggaaggttaagggatacaccagagcaagggaaattagaaggaagttgagttcaaaaactggtgatgatgagagttgctaacctgtttttgaatcctcaaaagtttaagtggtgttccctttcctgtgggctaagtcacatcttataaggagaatggagagctcaagattgttccaatttctggaattatgtgttcctggttgcaagttcatgattggggtataaacttcaacctactagaaaatactgttttcacttcatagcagtgaaaattgaagcagtgtcttttcaattctgggcctaaaggctgaggaccttactaacctagatttttctgtcatacccaaggccatttctaaccagaaaccatgctgttcagtacctcaatttcttaggcactgttctttcctagataggcatccttaactgtatggttaatgcctcaaagaagtaaacagttaatgctcttggtgctgatcttgggatttccattgttattaaagattgcctcatagcttgactgttttttaactatggagtgacttttcatatcctaatcatccataagggctaagtggaatgggaatggggaattcctcaagggaggaagcactcaaccattccaagggagaggtggaactgctgagtcttctggttgtcctgagaggcaaggtgagcattcctggacactttggttaattttactgtccaggtgtgacagttcttatctgtaggaacacctccagtgttcctaattaggaattctctcaagtaggagattactccaagccagagttgaaagactgggggagtacgacacctgaaggaattactggtggtactccttactgtacgcaactgtctctccatctcctatccacccacttcttttccctatttctctttctccccactcaccattcaactggaataatttaggcctaccatcggtattgattgcttaaccctaccaggtatttagagttactgctatttcattgttttgaaaggtaatgagagtcaattcagaagacaaatgtctatctggatcctcaacctactgtagtggaaagtgaaggagaaagtaaactaaccatactttcttattgctaggagctatgaaaggagcttttcatttgtgttatgtagggtacaaaagattattttgtaccctggccaggaaaggcagggagtcatctttctgtcttcctgcttcccctctttcaaccttcacctttttatcctcttcttccatatcctgagattgttgcttttgctgatgacatttctaagctcagttgcagatggtgtctgtgggaagtaaagcttggtgagaagagggctctctggtatctaagagaaagcagataagagttgctttaatgtcctggtgattaatcactggggtgccaaaacactttgaccactggatttctctcatatctcttatctcaaaaaattagtactccaaggctgagagaaagagactgatactgagtttgtctttcataccctctaagtgggtagtttgttagtggaccattctcaatttgcaaccttcagctacagcatacttctgtggaataagaaggtatagccatgaaataaatttacttagacccaggttctctaggacctgtaaatggatggactttttgatatcttgctctggcatgtttgtaaactacagatagtattgacagctctaaaggaatgaagggcattttatccaggccaaaccaaccctgagggaggcagcatgaagaaacctttaagaagtccaccatatagcagtcagagctaagtaaagaacaaagtctgagtcttggaggatgtcttttctctacctaaggggcctatctgatggactctctaggaggggatccttctccctcctcagtctcagaactacaatagtgcctaatgagggacacccttggtgaggatcagcttgtagatgaccctcctcaccaaggctaatgcaattttgaatgcatttggacctggagaaaacaggctgaattcaaagacctaaagaaagcttagtagcctggtcccttttttaaagtctggaactttttagtttggccttatactagtgttaatatttataatttctgttaggggaccaaaagtctcagaaaatgaagcaatataagaggtggaaataagggtaagaagggagaactagaagagtctggtagctgggctgcagaaagagacttggggtataattccttatttttatttatttatttatttatttatttatttatttatttatttttgagatggacttgctcttcttggagtgcagtggtgtgatctcggctcactgcagcctccacctcccaggttccagcaattctcctgtctcagcctcccaagtagctgggattacaggtgcgtgccaccatgcccagctaattttttgtatttttagtagtgacagggtttcaccatgctggccaggctggtcttgaactcctgaccttgtgatccacccgcctcggcctcccaaagtgctcggcctcccaaagtgagccaccgcgcccagcttggatataattgcttataaagaagagagggatacaggatggaaggaaaaattatggttgagttagtgaaatttataggataattttcttagagattcacagttcatttcaggaagaccccattaaagcaccaatactgagtaaagaattccccttaattacagtagtcttacctttagggttggaggatgggccaagaacccctaggatactatgaagacattttctgtagggaaactagaaaagatgggcaaatatgttaagcaatatgtaaggacatttacttaacactgttatctacatagttcaagagagtaattcaagaataaggaggaatgacatggatgcatcacattaaacagttatttgtattgtttgaatttcaaaactcctgcaagtggttttaggtatgctaagtcaacctagagactagtagtattcctctgccactcattttagatccaaatgatggcagtgcatagaagaacaaacgagaatatgcgaattagagtcacagaatgttagagctacaaaagaagattagtttgtttggttcagtaccatctttaaccagtaaaaaatgcccagaaaggccgaggaacatgtatggtgttgcgagaaagaagggagagaaagggaactaacattgttgggtacctgctatgtgtcaggcgctgcctaagtgctttgtttttatcttgattgattagcaccttgaggctaagggatagaatgaataaatggcaaaccccggctacctgggagcggtggctcacgcctgtaatcccagcactttgggaggccaaggtgggtggatcacgaggtcaggagatcgagaccattctggcttacacggtgaaaccccatctctactaaaaatacaaaaaattagccaggcgtggtggcacaagcctgtagtcccagcttcccgggaggctgaggcaggagaatttgcttgaacccaggaggtggaggttgcagtgagtgaagattgcgccacttcactccagcctaggcgacagaatgagactccatctcaaataaatacatacatacatacatacatacatacatacatacatacatacatacataaggctagtatcctgagcaatatgtaggagataaaagggagtggtagaccacgtttttctctctaaccacacagggctaaactagaggaagtaaagagtcagcatttgagagtgaggttaatctaaggaagtatttgccaaactgttgaaagcgactcataaataacttctccattcctagagaccttccaaaacatgttgataagagttaggactgatagggaccaagattactcttggctctggaattgattttcattttggaaaatcaagtcatgacctgagaatgtgggattaattgtacaaataggaaacaaaatggagcttctcatcctaaaatgtcttcaaagagaatagtatttatctaccatgaatgaaggagataaattcctttggtgactgtacttgtttttttgttttgttttgtaacactttgaagtcatgaaactgaatttgtaatcttggggagattcagtgccaagttcaaggcaggtggcaatttgaaaattgacagaataagattgtgttcctcatggttgtttgatataatatcccaatagttataccatgagggctgcttcagtggggagcattaatatcattagcagaggcatgtcctgtgtacagacaggacaacctctgaggaagaagactgggggagggtcccaccttcaggaagcttctgggtcttgtgagagaggtcagtcttacagctggtggagagtggggaatctgtaagtcaacatatcaatgcaggttgtaatataaaactattataataagaggaaaccaaaggaaagaaataatcggagaaagtggacttattcagaaacaattatttgaaaataaagaagataggggacatagaacagaagaggaaggtgagcagtgggaggaatctcatggaagagggctcatgtatgttttgtgcagaggctgtgaattggctgaccagaatggtacaggaaaggagtattaggaaatgaagttggaggagcaatctcattggcttgaatgaggaatttgagttgttaagcagtagcagggaacagagcatgatgagatgaaaatcacattgaggacttttgtagcagtacttggtcaaggaagcaggaaagttcactaaaatattattgttcttgccaagacatgaagcactgagagtttacagtagagtaagacaaggagaatcagaggaaagaaagtgggtccataggaattagcaaggcttggtcacagcttggatgtgaggagagggataaaagcctcaggatgatgatcccaagacacatttgtgctgttggtggtgatgaaagcttgataagagggaactgctttgtttttaagtaggaagtgttttgtcttattaaccaattgataggatgtgtcaatgttcagtattgcagagtctaggagggggcactgcccctggaggatagtggagcatgcaccatgtgtccagatgataacctgcatgcaccctgcccttttcaggttgaagaaccaggcaagagggagtctgttgctagggtgtgcccatagacttcaagaatgctatcctactctggatctgggaaagaaaatagtatttttgccagtttcttcccctttaatgctttgaaaatgggatatgactagcctgtggcagcatgtgcctgtggatgcacaattctctagcttgattcttggaaggcctttttctgtccctccctagggatcatttgtatctctgattcctgctcccagagccataaagtgggagcccccatttattaattgggctgggactggggcgggggtcggcgggggactctttagtgcggcaggcgggggtcttcccgaatgagcccattagccagccccaacggcagctgaaacggggcctcagccaagtcctctctgtttcaaaaaccctccattccctgcagcagatcagaacaaggcctgcgggagcccttagcttctgattgcagctgagaggaaggacaaaacaatttataggaagccaagtagctcctgtctcactgtgtcttcctttccaactttggggaaggggaagactgggatatggtgtcgcctcccaccatggcttgttacaggcttaaagtaggggagaatgagagtatatggacattgattgaacacttatgtcaatgctgtggatgtgtttacacatgtccctgctttcttcttcccatctacacacagttgagttggattagcagctactacttatggggggctccctaggtgtgtgctaagtctggggggtggggaggtatgcttatcatactccttcctgccccatacctgctctcagtctcccatttgctttatcaaaattcagggttagagttagactgcctcaacttcttttcctcttaatgggaggagtttgagtttggctctttttttttttttttttttttttgagacagagtctcgctctgtcacccaggctggagtgcagtggcgcgatctcggctcactgcaagctccgcctcctgggttcatgccattctgcctcagcctcccaagtagctgggactacaggcacccgccaccatgcctggctaatttttttgtatttttagtagagacagggtttcaccatgttagccaggatgatctcgatctccagacctcgtgatcagcctcccaaagtgctgggattacaggcgtgagccaccgcatccggccccgagtttggctcttaaaggaaggcctccttctgaaacatacttgtccctttggttaagccagcaagggaaaggtaggcatctataggggagtttctctgcagtggcccagagagaagctgtaaagggcaggaatgaatgtatcacttcctgatggaatgacacgtcttctcccttagggaatcatagattgccagggctaggaaagaggtcaggtaatctaacctctccctttacagagcaggaaactgaggcttaaggaaggaaagtgccttgcccacgcagtcgcacagcgagttaatggcagccagccagaactagatccaagaggccagaatcttgacttctgcgagtagagtgcccccaactttaagatgaccctttcctgagagccctgagcttcttcaggaaaggaaggatggactgtgagatttgaggagggagagagagattgagggggaaaggtagatctagaaagactgggaaattatatatacatatatatatgtgtgtgtgtgtgtatcttaaagaataatctttttttttttttgagacggagtttcgctcttgtcactcaggctggagtgcaatggcgcgatctcggctcactgcaacctccaccttctgggttcaagcgattctcctgcctcagcctcccgagtaactaatggctaatttttttgtattatgtagcctggctaatttttttgtatttttagtagagacggggtttcaccatgttggccagtctgatctcaaactcctgacctcaggtgatctgcctgcctcggcctcccaaagtgctgggattacaggcgtgagccaccgcgcccagcctcttattttctttttctttttcttttctttttttttgaaacggcgtttcattcttgttgcccaggctggagtgcaatggtacgatcttggctcaccacaacctctggcctcccgggtttgagcaactctcctgcctcagcctcccaagtagctgggattacaggcatgtgccaccatgcccggctaattttgtatttttagtagagatggggtttcaccatgttggtcaggctggtcttgaactcctgacctcaggtgatccacccacctgagcctcccaaagtgctgagattacaggcgtgagccactgcacccagtctaagaataatctttcaatgacatgcagattatacaagtgtaatttttatttaaagtcaagaggctggttcattgggaagcagatggcagccacagccaaagatcctgatgccctcagagttaacccaaacttcaaagagcattttgcaactatctctggaggttggatagcaggaaaagatccttagaggcaatgtgaggaattcaccctaaatctcaactgaagctcttttgctatattgaaaagaaaaagggaatggagaaagaaaacacatcggctagaaaactatggtggcggaagggggtccctgaatgatagatgagatgatagaactcagcaaaaagaggtatgctctgagattacaggaaaatggtaaggggaccttctcctctcctttattttagtttttaaagttttgagttgtttgatattctcctttgatgaggcagaaggaaggtggtatgtggtgatccacagtggcctaaataccctaaatagtgtgttcagttggctgacacgcattgctggttctgtaagtcatctcagtctggtgccaagatgcctttccctctttagacccctcctggatgtatctacagtcccttccagtgtttgctttctctgagcatatgagtctgggagccactgatgagcagagagtggaatactggagcatgcctaggctggaagcagaatggtgaagggaggagggcatcattgggcagattagaaagagttaatgggtctaggggagaggtactggggatctgcaaagtgaatattgtctgctgctgatgaagaaatagatcccagtacatatcctttacgttttgttcatcaactttgatagacagcatagaggaaatgtggaactggtctccatgtaaatttgtctctagggaatgtatgatagacctacttgtccagattacattaagtttgctgtcctgcaaacctcctttctcacagtcaggatccttttttgccttagagtccttcctgaaggagctgttatggatgagagagccacaagtccaacctcatgatctgatctaaaactgggtggcctcctcccagtcaccttcttttattagccttatattaaccattaaccttcattgatctttatgattctgggtttcacagcttctgtttctgttgaattccctaactttaagaaccatgtttttgcttttatcagcctgggagctaggtccctggagacaagaattttagaacagttatgactctctctgggagtgtactaaggttagtctgaatccttctggggaattcaggtttgaaggagttagaagagtgctaacatcaccgtcactgttacctaccaatggatgcttcctgggtgcaagaccaaagatgttctttggtgtctagtcccttgtctcatgtctaatgtaacctgccattttcctttacaggtaggagcaacggtgggaatgccctctgaggaatgcagtgatgtccatcagtcacctctcacccagagcctggcaaattcagtctctttcacagaacctaaagccaagccaggtaggggcctaaagccaatcagaggtcactggcctgcttttgtgtgggatgaccctactcccatcccaccccaccccacccctggtcttagagaagtttctttcttttttttttcttttttaatttttattttttgagacagagtctcactctgccgcccaagctggagtgcagtggcgcaatctcagctcacttcaacctgcgcctccggggttcaagtgattctcgtgcctcagcctcttgagtagctgggtaacaggcgatcttttttttttttttttttttttttatggagttttgctcttgttgcccaggccggagtgcagtggcatgatctcggctcaccgcaacctccgcctcccggggttcaagcgattctcctgccttagcctcctgagtagctgcggttacaggcatgcaccaccacacccggctcattttgtatttttagtagagatggggtttctccatgttggtcaggctggtctccaactcccgacctcaggtaatccgcccgcctcagcctcccaaagtgctgggattacaggcgtgagccaccgcaccaggctaacaggtgatctcagggaagtttcttattccgaaagatctccagaggagtttccttagctttttatttgaccctatattctgatgttctgccttctgattaatagattctcccttccagctagagcaggtaaccccctttcttggcattcctgttctttcctcttgtccagctgtgctaatggatgttcctctacagtgggttgctgatgtcagttagtgggttactctcagccctctcctccagggcagctagccctctagcccacaaccccatctatatacacagccttgcagggtctcactcctgttgcccaggctgtagtgcaatggcattatcatagctcactgcagcctcaggtgatttctcctacctcatcctcctgagtagctgggactagaggcgtgtgccaccatgcctaggtaattttttgtatttttaatagagacagggttccaccatgttgcccaggctggcctttaactcctggactcaagcagtctgcctgcctctgctcctaaagtgcagggattatagacgtgagccactgtgcccagccccaaaaagcttttttttttttttttttttgagacagagtcttgctctgttgcccaggctggagcgaaatggcgtgatctcagctcactgcagcctctgcctcccaggttcaagtgattctcctgtctcagcctcctgagcagctgggattacaggtgcccgccactacgcctggctaatttttggtatttttagtagggacggggtttcaccatgttggccaggctggtcttgaactcctgacctcaggtgatctgcccacctcagcctcccaaagtgctgggattacaggatttttttttccttccttccttcctttttttttttgagatggagtcttgctctgtcacccagactgcagttcagtggcacgatctcggctcactgcaacctccaccttccgggttcacgccattctcctgcctcagcctcccaagtagctggaactacaggcgcccgccaccacgcctggctaattttttgtatttttagtagagatggggtttcaccatgttaaccaggatggtctcgatctcctgacctcatgatccgcgcacctcggcctcccaaagtgctgggattacaggcgtgagccaccgcgcccggccccttcctccttttttatggaacactttacaaatttgcatgtcatccttacacagggaccatgccaatcttctctgtatcattccaattttttcttttttttttgagacggagtcctgctctgtcgcccaggctggagtgcagtggcacaatctcagctcactgcaagctccgcctcctgggttcactccattctcccgcctcagcctcctcagtagctgggattacaggcgcccccccaccacgcctggctaatttttttttgtattttttagtagagacggggtttcaccatgttagccaggatggtctcgatctcttgacctcgtaatccgcctgcctcggcctcccaaagtgctgggattacaggtgtgagccactgtgcccgacctccaatttttttagtatatgtgctgccaaagcaagcaccaaaaagctattttctatttctttcttctcagtcaagatagggcagttctgtcccttctcactacctctaatcagcttcttcacttcctttccaggttcagtgggaaatcccacctgtccaaacactgtgtgagacaccagaattagaggcctgcaagcctgcttccttcatccccaatgcccagatgggacaggtcaccagcctcctgtgtctacccccacctttcttgcttgctggtaggtgtgctgctccccctacccatcaaccccaaacagggttatgtttctctctcggagtatttttctctgttattaaatgtctccaacaaggggaaggccttggtgactcgcctgtatgtcttcgtaacttccagcccgaatctgtaaagagccgctaacctcctggtatcaaatgtccatccctttttctatagttcatgaccatttttcccatttagtgggtgtgggaatggaccagtaaacagatggtatttggtactggagagggagagtctaatgacaggtagcctttcttctgggggctagaaatctgaagccacagatgtgcattcttcctagttgcttgctatcctgggagagtactaggatttttttttttttttttttttttgagacggagtttcgcttttgttgcccaagctggagtgcaatggcacgatcttggctcactgcaacctctgcctcccggattcaagctatactcctgcctcagcctcctgagtagctgggattacaggcatgcgccactatgccaggctaatttttgtatttttattagagatggggtttctccatgatgatgaggctggtctcgaactcccgacctcaggtgatccgcctgccttggcctcccaaagtgctgggattacaggtgtgagccactgcgcctggcctacctggatcttttgagcgaatggttttatgtgtgcatttgtttttaataatatccagactgttccgaaaggaaagatgatttatctagtgtctatttcccaggaccaggatcttaggctctgagaatctgtccatactcattcccagatgcctccaggaagtggagaatagatggccataaagcagaatcaactactaggtgttactgtcttgagctcaggtgtcagctctcctctgggggctgttgagagttgcagggtcaggtgtgggcagagcatctccctgcatcctgggcataggaggtgacatcagcttatcctcttgaccctaggcctcctctctctgcagtgcctctctcatccctgcaatccagacagcacatgcagcagctcaagtaagtgccacctctgggtaaggtgctccctctcctggtaggcatatgggttgagttagaggtgaagcaggtgggctgaggtagacagagggatagagcaagtgttagcaagaaacgtccctggatgtagtcaagcagtaagtatgcatggggtaccttgagcaccagcatttataacttatcttcatgtcttctgtctaccaggttatctgatcacacagaacaggcctgccagttgggcagctgcagtcatggtttctgccacacgagggcgctgctggccaattaaaactcatgccccttagcagacagtttggggatgagggcaccctttctccaaaacaggggtcagaaactctggggctctctgggccccagagagcatgggcccaaaaagtgagacaaatatttggtaccacttgttcttccttgaaaatggcctgagacccctaaacactttgctctagtggcctgacatctcaatgtgcttccagctgaacttgggaagccccctctttccaggcacttaacaccttgcacaggtgcatctctcccttaaggtgtagcaggttccagctgtatgccccgttgtccccctgccttaatggcagtcactttccgacccagatggtggaggtgcctgtggtttttagggggaaaaaatctcttataattgttctaagaaaagtgttttgttagtgagaaagtgttaggggtgactgaagcctgggagagttagtctccccgtcacctactccagcacaaacctatagaattcaagatggtctagtggatgtttgcagcctcagtggctggaatacaccccaggacattccagggccctgagccaaaaatggtgtcagaaagctggataggagtgtgggctgctttgggccatgagcctcatacccaccctgtatcaggcagtgtttctgctaggggtgccaaatggccctggggcctctatgggactgaggactccacaattgaccctccatctccatgaagcccttccaggctgaacaggctaagggacatgacagaggttctcctcctccttcctacccccatgcctgagggcccctccccaggaggacagcttgattaaacagtcggtgctgctggaattactgcacagctggcgctccccccagcaccccgagcagagcagcagtgcagattaaaatctccaattagcgttaaagtgaagtgaggaggtgctgaggctgccaaggaggccagacgggggccctgggttggcaaaacccccactcttgcctggattctgagtgtcacccttagtcacccctactttcccagctcctctcccaacagctttcagtgcccattagttttgtatcgcttggggccagagggctttgcagaggggtggaagggggcaaatgccttacctaaaatgctagggacaccgtaagtatggaggaggagagcggtcagtgctcatcaagggagataccctattcactgcctgccaggcagccaggccaaggtgacttcacgctacagctctgcttcttctttttgcttgaagaaaagataaacaggacgggtcctttcaggtcctttacctatgaagtgctaggggacatggtgcccacatgaacatctctctctgcatattttatcctatctgacccatctgctcccaccgaagttatggctccttcctccctctctccattcttctctcagctttcctgtgggcaggggtaggcacagccaggcttgggagcatcgccatgccctgccacctgggtcccagcctgctcctcgttatagtcttcccagtttggggaagagcagtgatatgccaagaatggaggcctcagactctcccaatccctgatttttacatgtccccctataaggcccctctgccatctacacttttgcccttcatccacaaagcccaaaaggaaggcattatagctagccatgccctctgactgccctctgcccctttaagggaaatggaaatgggtacccagctgactgaacctactcaacacctccagaaattagacactagggcatggtgccaccctcccaggctggcacatgctaccctggcagaggatcaaataacccccccatcataccctgccccatgtcttcctctactctctccctcatgctttctctctctctctctctctctgtctctctctctctctctctctcagctcaaagcacagctgagccttaaaaggggggttgagggggtggagagaccaagctggggcaggggggtatagagctccaatagcacgttttcacctgccatttaattggatgtatttttaattaatgggacctcagggaccaacatgagacaatctgatatctgaatagggacaggggagggattgggtaagggaggaggattgggccactgggtgcggttaccgggaacccaggcccatcaatcactggccactttgcgttctggcatggagaatagcgaggtggaggaagggaggcactggggagaggtgccaggatttccccccaactgccaggacctccaaacggattggaactatactggttgactcaggtctggagcccaaaatcacagccagaatataaggtgaggctgttttcttgctcctggggttttgtctggttgggcttgtcccagggagtgctgtaaaattgtgaaaggaaggtggggacagagctttgaggtccttgtagagagaagacaagagctatggaccatagaaccagagactatggagagacggaggagaagggcagggttcagaggtatttctgtatgttttgacataaaataagtgccatggagattacatgcaaaatggcatgcaaatgaggcctggtgccttttggggtatgaatcgtagaaccttgcttttgcaagaaagggaacttggccaggtgcggtggctcacgcctataatcccagcactttgggaggccgaagcaggtggatcacttgaggccaggagttcgagaccagcctggccaacatggtgaaacgccatctctaccaaaaaatacaaaaaaattatctgggcatggtgatgtgtgcctgtaatcccacctacttgggaggctaaggtaggagaattagcctgggcaacagagcaagactctgtctcaaaaaaaaaaaaaaaaaaagggaacttggagctcatcttgccccaccccttcattttacagatgtgaaaaacaagacccagagaggggaaatcatttgaatcctgtcctggtattgctttgtgttcctggatttggagaatttctgggaacacaggaaaaggaaaggtaggtaggtgttgggggaggaaagtcaagggaagaaggtatgcaggatattattctccattgcttgaagtctcaagtttctatcccctgtcttagaagcaacttaggggagtcatggacaggttcagcttctatggagcactattagggggacatttcctctatacagcttgttccagagatcatcttatccattttcttgcttccaagtacacaaatcccctacagcccctgacccctatggaattttaccatgtcttataagatctacagggaaggaaatgcattatttaccccacctccttaaccaagaagcaaatcccccaatcaagactaaatgctgagcttttttttttgaaatcttaccacatatttccctgctgcaatataataagccactggagaaacttatgccaacaaatgtgttaaggagtagtcttatacgtcttgtcccatggcaaagcctagaacagagatagaatttaaattcaaggccctgaaggctgaattagaaatgctcctgaattcatgtggtgccatggccttagagctcttagacccctctgactcttgtagtgttgatgtacactggagaaaggggcaagtttccagctgtacccatccccaaccccttgcttccttcagtgttcacatgctagggttaggagggaagaaatgaaggagaaagggggttctcccactaggttgccaaggtggcatttcttgccatcctcctccttcctcagaaaattcaacatttttagttccatgcttcatgagactaagttaggttagggacaaggataggcacagagcttggaaagcagtgccagtaaaaactttatcacactccccaggcccccaacacccttcccccacccaagagttgccttctcttccccattttatatccccaaatcccctgagaagagcaagatctgcctaagtgccccccagcctcacccagcccttccttcagactgtgagtcatctccttggctgtctcattgcctgccttcttaactgcagacaggatgagaagagctctcctcagatccctccaaaacagtttggaaagaatttatctaggaccccgtgcctacttctaagggccccaggggtgtcagcaggggaggaaggctgtgccaaggggctggaaaggaagattctcttgttgggagagcagataaaaacctgaaagtggtgacaaggcagagggcgaagtttgggaactgagacctgtagtcccacctgtggggctggctgcctaatgtgtggcaggacatttagagcaagtatggtttgtaggatttattaaatggctgctgtttacagagctgctgtttctactctggaacacacagcagtggaaaggagcatgcattgaaggagagagggtggcaggctttctgtaagccctctttttcaccctttgtccatccctattccaacatattgcagtcatgttagagctagggctaaaaggccctaaaagcattcagtctatattctgggtgtttctccaaggaacagagcctcctttcttgtaactcctgtcagatctgcctcccactcctaaggcttttttgtttgtttgtttttgagatggagtctcactctatcgcccaggctggagagtgcagtggcgtgatctcagctcactgcaacctctgcctcctgggatctagtgattctcctgcttcagcctcccaagtacctgggattataggtgcgcaccaccatgcctggctaatttttgtatttttagtagagacgtggtttcaccatgttggccaggctggtctcaaactcctgacctcaagtgatccgcctgcctcggcctcccaaagtactgggattacaggagtgtggctcagcctctcatttctaaggtttagccaagggtgccagatctttgcggggaagagggatgacttgaagtgagtggaagttaaaaatggtagtacccagaatttcctgcactttggagaaaagagactaggtggggtactcaatgttagcctacggctcaactcttactctaataggatctctttcctccttctcccctaaatttttcccactggttgaagagagatctggatgactaaacctcccatcttgacaccttggagtttgttaagcaggtcccctctctgtagcttccaaagccatgaagaaggggaaggaaggccaagacaggggtagatagaggtggcagtgccatggtgtccatcagcacccaaggagaaaggccaaggagaagaaggtaactagagaggaagccaggaggagatgtctgctcctgaaacagcattcttaccccatcctctcctgcttccttgatcacatgccgacagggctgtttgcccaagtgtgccagctcgcctggctagtgatcctgctctgctgtgcaggcagccagctctctgccccagcacagagcacatgctgaggtctctcacactcctttgctcactcatttccatgtgtctatgttgtggattcctagaaatgaaggaggggactgtgggcttgaagataggaagatggcaggctctggggcccattgggcacatatctgcctggctggaggaaggaaagagggagaaggctgctggtagctcagcaagctcaaggttctggtgactcatagcagtggaggtggctcacaaaaacaacagaggggaagggatccaggcctattagagctctcttttgccccatatctccccactctgagctctgtgaatgaaggtccctcatctggattgtggagcaggggaggccccaactataaaaaaaacagggaaatgggagagaagagagcaggggaagctgagcattcccagtgagaggtatctcagtgaggaaaggataggagaggccagttattcttgccctactgtattcattgggtgcacaggaggtacggggcatccatctgtgctagggtagctcagtgcccctgggcactttccagaagaggggtttctaggcaaacacagttactcctccctaccctcacttgcctgcccagaactctaggtacccagctgacactaaatttttagaagtaaaacaagctgtgttataacaccagaacctggaaggataactgctgggtctcagtcctctcctttctggaaacagacacctgggacaagagagaagcagctagggactcctatgctggctgaaccaaggtagtggtgcaggctgtggaggtgggtgcagaaccatagatcttcagaagtgtcgatttcctcctcccttgtgtgccaggtgggcagtatgcatcgtctccatttttctgatagaggggataatagggtaacggggtttgaggtcacaccaggagaaagaggccagaaagtggaccaggagaaccattcatgccttggactccagtcccaggggcctatactggatctggtaaagagtaacagctaggatagccgggcacggcaaatcacacctgtaatcccagcactctgggaggctgaggcgggtggatcacgaggtcaggagatagagaccctcctgaccaacatggtgaaacgccgtctctactaaaagtacaaaaatgagccaggcgtggtggcgtgcacctgtagtcccagctactcaggaggctgaggcaggagaatcgcttgagcccgggaggcagaggttgcagtgatctccgagttgagatcgcgccactgcgctccagccttccagcctgggcaacagagcgagactccgtctcaaaaaaaaaaaaaaaaaaaagagtaacagcgatcttgtttgccaatgtatccagacacataatagtaaacatctggctgggcacagtggctcatgcctgtaatcccagcactttgggaggccgacgcaggcggatcacaaggtcaggagatcgagatctggctaatatggtgaaaccctgtctctattaaaaatacaaaaaattagccgggcatggtggcaggctcctgtaatcccagctactcaggaggctgaggcaggggaatcacttgaacccgggaggcagaggttgcagtgagccgagatcgcaccactgcaccactgtactccagcctgggcaacagagcgagactctgtctcaaaaaataaattaattaattaattaaaaaataaacatcccatcttcagtgaaggatggactaagaggaggagggttctgtgacagagcctgagttctcatttgcctatttctgttctttcattgctggcagctctgctctcctgccaggatgagggacctctgcccacttgctcttggtggtccagagatggctttggttagaaaaaggacagaagattagccactccttgtgtaggaagtcaggaacagctccattcccccagctctcccgggcagtatcagaagccccaggttgcctgctgggagatgcataataaagctcagtcctgaactaaaccaacacatcacctggccctgggtatagaagtagtattgtgagggggatcttgggtcttccaggccaggtgtaagcaaatgtagggagttcagccccaggagagataaaagaatcatgccatggccaggtgcagtgacttatgcctataatcccagcactttgggaggccgagatgggtggatcgcttgagcttaggagttcgagaccagcctgggaaacatagtgaaacctcatctctacacacacacacacacacacacacacacacacacacacacacacacacacacacacaaagccaggtgtgatggcatacatctctagtcccagctacttgggaggctgaggtgggaggattgcttgagcctgggaggtggaggttgcagtaagccaagattgtgccaccatactccagcctgggtaacagagtgagaccctgtctcaaaaaaaaaaaaaaaaaagaaaacatgccacgatgccacatgctccctaatcctctactttctcaaaccctattttctgcctgccttttctttcacctccctttagccaattccattcctggctacctcatcccctccagtctgaaaggacgtggtaagtacttgtctgttccctatgcttttctctctctcactctcttcctctcctcccagctcccaactgagagctatccctgtttcaactctttccagtgaatgccaccaggatctgaacccaagattccagcctcggtcaccaccctgaccctgagaatgccactgggatggggagaacttgtcagtcttcatccttccccacaagtatactgaagccaggacaggtatgtccactgccatgaagggccctgccctggagtagagggcagccataggggtacagtggggtcccagccctaaatgtgtgtatgcctgtgcattgggcacactggtttattagtgttatttcagcattgtgatgcagagagagtaagtgtaacagctgctccttgcttgcagtgtttattgttacctagagacaacctcctggctttttcccagctccccctccccgctagcccaaccccctccctgccaacaatcctgctctctccacactgatgggaaatttatagcttgcccataccatgcctttaaccctctcctatccatagggtagatgggctgagggaagccaagtgagcagcaggcatgcttgggcaccagcagggtagaataatgtgtggaggagggagggggcaatgacacccctcccctccattctatgtgtccagtcttaggcccctgctgccctcctggctctcagtggagagaaaagaggaaataaatttggacccagccttgagatcctggaagagctcctttggatttagccttgggatcctagcatctcctcacaaaattatgatcttccctgggcatctctaagccaccaattgggttgcctgcacctgagcaaatacagcaaggtagtattgaaacagaagggtaaatacagagtggcagaaccctcagatccctcctttatgtctgagagagaggtagctgtagagatgtcttatcaagacaagaggtgctggcttgagaaatgctggctggacttctacagctgggtagatgttagacatgaagccggccgctgagtctggtgggagaaactgcccgccttaacatcaccctgagcgcagcactaagatcctgagagacccctgggtcattctctaagctggtctttttgatctggttatgctgctgctttttacttttccttcctgggtcattttctcctacacatcttctagtttgacaccttggggtagatccaagagactgagaagatggaggcatcctagtcatggcctcaacaaagctggggaaagaaaaactccttctgtcctctcttgacctttcatggaggggcactgtgtgttctactcaccatcctcactggaaacagaagagaggaaaaagcatcagattttagcagaaaggatagagggaagacatatggaaaaacttactcatgggatgaaagacttcagattggacctgcttctcttctgagatttttcttctgcctgccggtttgtttttgtgtctacctaagaggcattggatgaagcacagttacttttccaggcctcttccagacagcctcagcacagtttccatacagtgcactgcttcttggttcttctaaatgtcatgtagtatgtgtggtggttagatcacaagttttggagacagacagccctgggttccagtgccatctctgccacttaccagctgtgctaccttggtaattcacttaacctctttgagtcctagtttccttgtaaaatgcagaaaaacaactactccttaagtttgttgtgagaatttcgtgaaataatgtgtgtaaagcacctacaacagtgcctgatactcagtaggtgctcactcaacagtggctggtgcaagagtactactacttttatgaagttagcagggctgatattgcttcaaagactttgtgagtcccctgagattaaaggccaaatgtatgtgcacatgctgggggagaatgtagttttctacacgatgtggagtaggggtggccatcctctggaaagaaagtagtcccaatacttgactcagactccccaagaaatcagttaccccattcctatgcctctcaagccagagtaccttggcaactgttctgcctggaagttcagcttcatccaggatggaggggggagagatagtcattagaaggatagcagcaactagcatttgctaggcactttacagttcgttaattacatttatctgcattagctcttttgatacccagaaccagtaaagagaactccatttattgatgcctgtatgccaggcattgtactgagtgtgttttttaaagtatgtttaaagcctatagagtatttcatcccctggatatgctgtgatttataaggctcatcccctattttgaatcatttggttattttttctgttataaaaaataccacagtgaatatccaaacaaataaaacttcatgcattttattttattttatttactttttgagacggagttttgctcttgttgcccaggctggagtgcaatggtgcagtctcggctcactgcaacctctgcctcctggattcaagtgattctcctgcctcagcctcccacgtagctgggattataggcgtgtgccaccatgcctagctaattttcgtttttttagtagagacggggtttcatcatgttggccaggctggtcttgaattcctgacctcaggtgatccacccaccttggcctcccaaagtgttgggattacaggtgtgagccactgcgcccggccttcatgcattttaaatagttaattctgagacatggaattattggtcaatggatacaaatacccacctcccatggttgtgttcattttattgatgtacactaatgagaatataatatttattagtcttcctcattggaattctacattggaaacacaaggcggccccttttccctcctatacctaaaagagacattaataatctatcaaggcttttaaaattgagatcattgtagatccacatgcagctgtaagaaataatacagagaggtctcttgtacattttgcccactttcaccgaatggtgacattttataaaactacagtataatgtcacaacaaccagaatattgaccgtgatataacctaccagtcatatccagatttctctagttttacgtgttctcatatgtatatatattaagtactatacaattttattacctgtgtaattttatgtatccaccactacagtcaagaagctgaacagttctaacacaacaagaattcttcatgttgcccttttatattcacacctccttccctctcacccacctcatcccctccttaacccttgacaccactaatctgtcttctaaaatttcgtagtttcaaaaatggaataatgtagtacataactttttaggattgtcttttttattgttttagacaggatcttgctctgtcacccagaatggagtacagtgtctcaatcatagttcactgcagccttgaaagcctgggcttattagctgggcatggtggcatgctcccatagtcccagctacttggaagactgaggtgggaggatctcttgagcctgagcggcagagattgtggtaagccaagatcatgccactgcacgccagcctgggtgacacagcaagaccccatctcataaaaaagaaaaaatgttaaaaaaaaaaaaaaaaagaaagaaaaaaaaaaatcctgggctcaagccttagtttcctaagtggctgagactacaggtgcctgccaccatgccagactaatttttaaatttttgtaggaatgtaaaatggggccttgctatgttgcccagggtggtctcaaactcctagccgcaagcagtgtttctgccttagactctcaagttgctgagactacaggcatgagccactgtgcctaggttgtcttttttcatgcagcataattccctgagatctgagtttttatgtgtatcaatagttcattccttttatttattccatggtatgaatataccacagtttggccagttacctgtagaaggacatctggactaattccagtttctggctattacaaataaagctgctatgaacattcacgtacagatttttgtgtgaacataaacttcttcttatattaccaggttgcccatcagcaaggttctctcactttgtactcattagcaatgaatgaaatagctcatttcacttgtttgctgaatgttttatattcataattattaaacttcttaattgggcatggcactactattatctccattttatagatgtggaaaattgaggctcatgttaaatcattttcccaaggtcacatgttaagtcacaaagaagagcctggaatccaagataataaggctttttccaccacagctgacttttcaggtggaggcctttctacacttcactaaggttgctgaaaagagggtgtgggtgctactagcagagagatgttgggggcagggagagcactggagcagcctgggtcactcaggtcctcacagccaacttcagtccatagatcaaaagagcggcacaggccatgtggggtggctcatgcctgtaatcccagcactttgagaggccgaggcaggtggatcacttgaggtccaggagtttgagaccagcctggccaacagggtgaaaccccatctctactaaaaatacaaaaattagccaggcgtggtggcaagcacctgtaatctcagctactcaggaggctgaggcaggagaatcgcctccaccagggggtggaggctgcagtgagccaagatcgtgccgctgcactccagcctgggcgacacagcaagactctgtctcaaaaaaaaacaaacaaaaagcagcagtgtcatggatcaggggacctgtgcccttgaaattgtttcccctttgccagagaacaaggctaaagtgaatggtgcgcctgagcattctatccagacacctgagacctggaatggggaagggaggacccagcctttggatgcctatcagaggatgagatattaaggtcctctttggaaatgtgctgttgaatgtgtttatgaggcctgaggaaattgagacctatgataagtgagctctctattctgaggggtaagggagatatagcactttttgttgtttttgaacaggggaactatagttcatttacaaacccatacatccacatacaccccttgggcaggctcagtgtctaggacgtggtagagagggcatgagcacagtggaagcaaaaatgccagttcagtgcttagtgctgactttaccaccgttcttcatggcaactgaactcatggacagctcaggagaagctagagaaattgttttgtctgtcactcagcctctggggcactggttgaagctgacaggtggaaacctagagttggcccagacatgatgaatgcagagatgccaatttgtaggagagtaggtttggctcctctcctgggagttctgtctggccaaaggctcccacctcccacctcctgctggagctggctcttttatagttgatgttaccattgctctcttggcctattccagcagctgtggactcctaacagttttccccactcacttacagctgcagaatcaggctaagattacgtatcactcctccatcttcttgggcccatcaggaacagcatatctcccagtggtacccactgtccctgcccagtagtcccagccatgtgggatataaacactgaggctagacctggaatggggactataaggattatttatttttttatttttttgagatggagtcttgccctgtcacccaggctggagtgcagtggcgcgatctcggctcactgcaacctccgcctcctgggttcaagcgattctcctgccccagcctcccaagtagctgggattacaggcgcgcacctccatgcccagctaatttttgcatttttagtagagacggggtttcaccatgttggccaggctggtctcaaacttctgacctcgtgatccacccgcctcagcctcccaaagtgctgggattacaggcgtgagccaccgtgcccagctggggactataagaattatataggcaccacactttatcatcgaaacaactagagatacccattctgaacctctgtcctctggttgggagttcttagacaaagggagaccactctttactagctctttcacctctacccactctgagattttctggctctgggaggtcctgactgtggctgggaagacagctaccttctcttagagccaagatggtgaggaaatctcaagacccctccctgccttgttccctttccttggctgcttctctattcaggtccccacctctcctggtaccactccattcccattccttctttctgttttcctctctctctcagcaagttttttatgtgattacaggcactgcatggtaattagtgctaaactcatttgcacaactacagttaattggctacaacaattaattaatgtgttggaaatttggcactggaaaaaaaagtttgtcatcaaaaaaagggcaaaaaattgtagagtgaggtacccataaaaatcgagggtaggcttcaaaagcccagctgggcctcaaacttcaggcctgcctcagctgcttttccactctcaacttcaacgcattttcctctctcatttttttcctcctttctttctctgtctctctcttctcctttttttttctttttcttttcttttttttttttttttttttttacaacttaagcaaactcatttccctgataaaatatagcatgactaatggctagagcatgtaaaaatcattgggaaaatgtccttggaagacgaatgcattttcagcagaataattaacttaattaacaaattcacatgcatattcatcaggctattaatgtcttctcggctcagcttgatgaacattgcggtaataaccatctcatttacatactgcattctactgcgatccaaaacagagacaacatacaggcgtatgcacacacacacactcacacacacgaatacacacaacatgcctgggccactcttgacttccaggttggctgggagagtgtgtgtgtgtaagcgaggcagggtagggagtgggtgagtgggaaccctgactgggtggtgtgatctttagatggccatgagtcaggtgggctagggatacccacatgtaaatatctgagagaactcaatattctctctctctctctctttttacttgtttccatttctctgtgtcattttctctcttcttctcttgcttcccgccccccccccgcccccatatctctctagggaaaaacttggtatctgtgccaacttttttccccctcccctcctccctctctcttcttcttccactctcccaactgctgccagccggcatcagcgccgaattgccatctccttgagctctctgtggagcaatctcagagagcagtaaggtgtgacgcgaggctctgccggcttcgcagcaccgcctgcggaaagagcgcaggatggcggaggaagattaagagaaatcgcgagcagggctcggctgccattggtgtgtgcaaacgccgaggaggaagggagagggagagtgagagtgaggaaggggggagagaagggggaaaaaccagcagctgtcggcctaattcttctaacactctgcttgtggtcatattagaaaaacagattatgcccctcggtgccactcacttatacttgacatacgttaatgttctatatctccattttccggttcttgatgacggtggacttgaggtcgaggaggatgggggcctgggtggccaaggggcacaaaaaaccctgtcctctcattctctcctgaccttgaaccccagtctgtactcgccctttagaaagcaaaccagtttacatctgatgccaccatttggcattttacagccccttataagatgcagaggtcagaggatacctggaggaccttacccctaagtcacccctcctttgtagtcttaataggtcactttaggaccaagtgagaccagcttttgtggcactaccccccaacctttctatgggctctctccctcaaatcagaagttgagggtcagagaagggagtctatgatagtgtgtgtcccaagagggggttacagagaagccataagcaaaacaaggccaggattgtttctgggttgctatggaaaccaggttccctcctcctggcaggaatggaggagtgcctaaggccttcctcctaccaccaatcctgagggttgtaaaggcggagtttgctaaggcctggggaaagggctggtcttggaggacaaaccaaccattccctatagctggcctgctattcagaggtctttgacccccacctttcctaccctcccacctctatattcagtcaaaggaggctttttcctctggtaccttgtcctctatagagacctgttgcttagcaaccactagtgctttcttcttaataactaacacggacggagagataaaatatctgtgtctatattcagttcccctcccctgtctatttatatttaataactgaaaccctgtcttgggttcccttagcacctgccttagagagctcttagagggattatccgcagcctgaagaaagaaggttacaactgaggaagaacttctgaacagggaagagtggaagaaaagactgcagtacgtagagcatcaagggaagctgtggaaatatattttcttaagtacaggtagagaggggaaacaaaatatttagaacttggaatgcgggaaggggatatccacagggattcttaagggacagctccaggtcctggagtggaccctaacagctgcttccaggctggcatttgccactccccacgcccttccctgcccctgcttcctggccacttccagtctatgtccctctcatatttcttttgtttgtttgtttgcttgtttgttttgagacagtctcgctctgtcgcccaggctggagtgcagtggtgtaatctcggctcactgcaagctctgcctactgggttcacgccattctcctgcctcagcctcctgagtagctggaactataggcgcccgccaccacgcccagctaattttttagtatttttagtagagatggggtttcactatgttagccaggatggtctcgatctcctgaccttgtgatccgcccacctcagcctcccaaagtgctgggattacaggcgtgagccaccgcacccagcctgtttgtttgtttgtttgtttgtttgtttgtttaaaaaaaacggagtttcgctcttcttgcccaggctggagtacaatggcatgatcccagctcactgcaacttttgcctcccaggttcaagcgattcttctgcctcagcctcccaagtagctgggattacaggcatgcaccaccacgcccagctaatttttgtatttttagtagagatgaggtttcatcatcttggtcaggctggtctcaaactcctgacctcaggtgatccacccgcctcagcctcccaaaatgctgggattacaggcgtgagccaccgtgcccagcttccctctcatatttctatctgtaagcagcctgttggatctccagtttcctagtgtctggatgttggtatccaggagagggggctgtgctgatgtgtgtcccccaaggtctgggtacttccccatttttcagtcactaggaaggagttcttctgagctctccactagaaaaccccacacctgacctggcagtgggggctgtacaataaccaaaaaatgagcaaggaaggtctacagtagcctaggcctgtatgtagagtcaggagacttggatttagtcacttctccttactctcctgtgatcccaggttattatccacttgatcttttaaagcccttgttgcttcatctataggccaggaataataataaagtttaccttactggactttagcaggatcagttaaagtaatatgtgaaagaaaatatgctgcaaactgtcacatttaactaaaatattttaagttctggaaaaggtctgattgctagggagagggaggcatcatgaatccagcccagccctgggcttaggaatgtcccttcccacagctgtcacggcctctggtcttccattagtttgttggcaagaggggtatgactctgctctctggtcattagggcaaggagctataaaaatcaaaatcaaacaccaagcagtctagggagagtcgtgcagtgttgtccctatcatttttctcacctcagacccaacctctggcctctagttttcggctgccaagacagcagccctaccgacaccccaccctgaccctctgcccctttcggcagtcagcacctttgctgccatcgtgctaactcacagactgtacagtttcacccgccataccccccttctctgcacctcttccaacccgagccttctgtggcagacagatggggtgtctgcgatggaaaaagctctgggctctacgccgtcttgggtgggcagcccccctccccaactccccattactccctctccccacctaagacactcagattcaccccaggcagcactagaaggggctgagaattccaactctcttctcttctcaggctcagctccagaagcagacccagaatggcatccttctctgagacccagaccccagccccttttcatggaagaccagcacaaaggaggaagtaggttagggaatggtaaggctccatgtgatgggactaatgtggagaggcctggggcctttccctgaggactggatggctggagtttgggagcctgagttgacagaggaggctaagcccgggcagctactttgttccagaaatctaaggtccctggagggaggctctgctttgggagggggaagggagctaacattgcagagcaccaactgtgaaccaggtacaatggcagagcctttccatacctgtactcacaactagcgggtgaggagtcaaggcaaataggtgtctcatagctccccatatctcggcagtcgaccacctcctcctttgattctctgatgtcactgccagttctcctcctattgctctgacctgtctttctctgtgtcctttgcaaactcattctcaactccttagactcagtcaagtcccccagttacacacttccatggtactatatatcattccttcagagcacttaacacagttatttcctatgtatttgtccagtcatttgaataatgatcctagtttcattggatggaaagttccacaaggtcagtgaccatttctatctgtgttcaccaatgtgttcccagtgcccagaaacaatgcctagcataaagcagctgttttgtaaatacttgttcaatgaatgaataaatgacaaaagaacatctctctggcctaaactcccttcttagccactccctcaccctgagctcacccaccccaatgtgtggaccagggaacaaagtacctgggaggtcaggccaccttgttctccctcatcaggacaggaccagtcctagtttcagggtatggggccattgctgtgccagagcctggtcctgcctgtctgctcttcagcctttccagggactgagataattcaaagtctcaacagtttttccccacatggaggcctgaaatcattcatgtgagctggaaagggaggggagttccatcagaggaaggtgctctgaagaaaatccctcttttttgccttgccgagactgcagagaccatctgttgccacccctctgtttgcttctgtcctcttaccctggacttcagggaaagagatggttaaaccaagtaggagggataggcagtttaccagatgcaggacaggctgcttgatcctgaaaatgtctggggagctagatgatgagcttcggccaggtgattggagcagaggaacacagaatccaggaacagccagtcctttggggctgtactccctagaccctgggaagcagggtatagataaaatgacctttatgaggtgtccagcctccagcccagggctttatctgactcctttgctgcccttaccatctgacctcaaacaatgttcccaaatctgttaagagttaaagttagcacaaacgtggtagctccttgctgtctgtggctattccccattcttaaccttgaacaagcacacagacgtttgcccatctcccagcccagagcatctcttcatccagctcagtgccaatacccagtgctcacagcagcttctcagcccccttatcctaacagtgcccgtcagcacccaggtatctagggtcctggatctgggaagccactctgggcagtgttgctctctctgaccccacctgttctctgggccctaatgaagcaggacaactcaaggcttcaggccaagtccttgtgtccttatcaaaggcaacatctgtcccctccaagaggataacccctggggggaggagggtgagacaggcacaagggagaaatcctgatcttgcctgggccctcaccccagattccactgcaggcatagattgggggtgaaagccaagacagtcacagaagccctcacacacacatgcccctgcatgggccttcatgcctctgagcccccacatatgaatgcccctcttgggctcacccagctacctgggctgctgctgctgccaagcggccttcttttattcatgcgttgttttattgctggcaaatgctgctgcttgctgctgttggaggcgttcctgccaaatccatcccaacatcttggcctggcatcagggcggcatgctaatgtggaaatttaaagagccgctcggctttaaatcggaattttaaatgagcagcagtgctccgaggggacctgggcaaaatcgaacagtatctgatccacccttcctcctcccacacccacagcatcaccccaagttcctcccacccctccctttgatttggacattagaggaggtattggcatgggacatcctaagggaagaaagaggtaccagggcagaggaatttgttcaagatgggggtcatctggaccagtgaggagctaggatcactctggaccaagaatggatctactccttgctgtcataggcaaatgaccaaatacaggatgttccacaagggagaagggctagaggtaatgaaactgaagttactccctcacttcccgttttaccaggaaacaagaagagaaggcctgctctgcagagaagagggaaggtggaattccaagaagacactcacacacaacatactcttgttgccaatgggatgtgtgcacacagctgtgcatgcaggctgggatgcttgatgaggtccctgcagcacatatacacatagctcacacatcacccctgcatggagaggaattatctgcacatggagggcggtctttctttccctatccaggacactattgtaaccccagagcaagctggcttctgcaagttgctagcctgaactgtgccccaggtttttccgtggatcctaatttcccagatcctggcagctgcttgagtcagccatggtgatggatctctgcagctcttctgccaggacaggggcagggggaacctgaggtcatcctgtgcacctgtcttggccacagtgtggtgccttctctggtgatcaccaaatgacaggctcagacatctcatctgggagaggttttggaaacagccttggtttcaaaggaaagaaggggctaatgggaagcgagagaggcagagtctgtgcctccttgtgattccctctccttacctatctccaggaggtaggtagcccctcattatcagaaaacattttttgagtgcctgccctcagggagacaccatgctttactttagcacagtgcctcacaattttctggattgacagcagccctcagaatctggatgtgctgtccccattggagggtccacagtaacacacatggtgacatccaccttactcatgttaggctaccaggccaagggatgctccaagaccttccctagaattcctcctccctcaaagaaggagccagctccttcaggggctggtgtggctgccagccaagaggcttggggcaggcctggggcatgcagctgatacctgcccaccagatctccaaggaacaccctcctcccccactcccacagcctcattcagatggccactgggctacaaggagacagtgctcacttctccccactcccagaaaaaacttcaaagctggacagcctccctttccattgtaacctgttccaagatcctccacttagactagatacactaacgacccaccaagcaattttgctaggcaggaccaaatgtttaatatagtaggggttgagctaggcctaggtacggaaacttgaggagtgaggcttgggctggaattctgggagaagttgttgaggtcaagagaggtatgaggaagaacaacttgatgtgagtgaaataggacagggggacatgaaggggagggcctgaaagaatctgcctctctcatctaattatcaacatgtaaataatatgcaaataacacactctttgtctagagaccacaaggccactgctttttggaagtggattacagagggcccaccagacagtatctctgagatcctcagatatgggacacccaggctcaagagagaggccagagtgcagccatctggttcttgcttattccctggattggctcactttctgtgagcctcagtttccctatgtgtgaaatggcaagactactggatggtctctaagggttttttccagtaccgacagtctgggattgtatgacctgggcccagtgccagggcagagtggagggtttgattccattctggggtggaagccaagatccttggctctcttgcccctgctgcccacctcagcagttctgtcatgctgcccccgcagcccgcaacatacctgccatcccaaacatgggcagttttctgaaggcagtgttttcttccatccatgcctttacctacactgtttctctgcctggtatgcccttcctgtttcagcccctcagttggctaagtcctccaactccaacagccttgcctaccttactcctccactccccagttctgacaaggtgcctcccttctgggtgcctctatgcactgtctctttacttctctcttgtcccactagaccatgaacttttggttttgttccagactaaatctccattataagtgtattagtttcccaaggctgctgtaacaaattaaccacaactctggtgtcttaaaacaactgaagtttattctcttacacttctggagatcagaggttcaacatccattttattataccaaaatcaaagtgttggcaggggtatgctctttctggaggctctagaggagaatctgttccttgtctctttcagcttctagtggctactagcattcctttgcttgtggccccatcactgcagtttctgcctctgtcttcacatcaccttctactctttgatatatgtataatttctctctctctctctctttcataaggacacttgtgttggcatttagggcccacctggataatccagaataatctccccatctcaagattcttaatcacatcctcaaagatgaacccattttccagttaaggtaacattcacaggttctggggattagaacatggacatatctttagaagctatcagactaccaaaataagcaaagacattttaaaatttaccatttattaagtaccatatgccagacacctacatacatttttctcacctcaattaagttttacaataaccctgaaatgtaggtattaatgcctgtattctatagacgaggaaactgaggctcagggagattgagtcacgtgcccaatgtcacgtagctggtaaatgacagaactaggatttgaaaccagatgagctgggctccaaagccaacatgctttttgcctcaccaacagcctctgagcctactccaggccctggcacaggtttcttgcctgaatggatgcagaaaaagaaagataggtagacaagagaacagacgatgaggcccagcatttttagtgatactgcttctagctttcttttgccaaagcccccttaccacccctcttattctcccccaccaaccctgacctcttgtttcagaagcctggaataccccccagcttgcagccccctgccaactactgctgcccagaagggtggcacagtgcctggacttcaggcagaatctatcaaatcacagaaccagagggtgtctggaagtcacctcatctagtcctctgttcacatccagccctgctcacgaggacaggggcagacaggttcagggtagtgggcagcagaaggatgaagtgcccatctcccttcagctgccctttctcctttcttacttcttacacaatttatattggaagtcctcactcagatctgactttgcagacatcatgcataatgagaattggccagaatcaggagtcctatggtcataggactgacccagtcctagattctccaaaaaataaaacgagatttttggctaggtcctttcacctctgtgggcctctaattcttcatctttaaaatgggatcgataataggggtaataataatacccaactcacagggcctttgggataataacacagcccaggaaagaagcatccaacccacggcctggagcaaggcaggtgctgcaggaatattttataacaccccccgtcagccctccagccaagcccctttatcctgggtaacacaaggctctgctcacctcagccattctggtctgcctcgcgcgctagactgtgaattcctcttggcaggatcttgttcatttctaatcaccgcccgttcccctccctagtgtctagcctgtgctcgggtacgtaagttcaacacacatttaataaatacggccaggcgcggtggctcacgcctgtaatgctagcactttgggaggccgaggcgggcagatcacttgaggtcaggagttcaaaaccagcctggccaacatggtgaaaccccgtctctacttaaagtccaaaaaaattaaccgggcgtggtggcgggcgcctgtaatcccagctactcgggaggctgaggcaggagaatcgcttgaacccgggaggcggaggttgcagcgagccgaggtcgcgccaatgcactccagcttacccaatagagcgagacgccgtctcaaaataaaataaaataaaataaaataaataagtgagcgagtgtatgagtcggcctcccaagtcctgagaggctcagagcttgacccccaccagcaacctttgcccgcacgaccatttcccctggggtcctggcggcgaccgcaatggaggggaaagaggccactgcagctttaagatttctctcgggcgtcccggttgccaaggcgcggttgccagcgccctgcgcggagctgcgtcctgctttagcgcgcggccttcgggtttccgccatcgccgccgccgccgccgccgccgccgggccgcgccgggctccgctcctccgaaccgtctggcggacttggcaccggcccccgctcctcagtgcccccgcagtgcgtggcaggctgcggcttcattatcctgattgattcctcctgctccccgacaccatgggggccccggacaaggaagggaggcggaggcggcatctgcaggccccttccccggccctcgcccccagccgctcctcaggccaccctgctgtggctggccaggcagggcggggatggaggaccggccccgcctctgctctcttggtgggcggggaggggagggccccaagggagagcggagcagtgtccggtcggtgctcttccaaggttccagctctgggccgcgtacaccctgcctcggcccgccctcagcaaagattttgcgccttctgaaccgggaggatatggaaaggttggggtggggaaagaacacagtggaggactgagaacttcaggaaaacaagccctggtaaaacgggaaaggtgacatctctgaggagcgttggtcacgtgtgtcaaggcctggtgacgcgtgtcttatgtgcctccctgggcatcttctcagtacagttctcagtagaagcaggggcagggtctggacccaaccaacacaggacaccccgcaaggatctaagcttaaaggaaggccaggagtctgtgtgagggagaggaccttttccccagaatccagcatggtgtgcccaccccacgcccaaaccaagtactgacaccttaaaaagagcatctgggccgggtgcggtggctcccgcctgtaatcccaacactttgggaggccgaggcgggcggatcatgaggtcaggagttcgagaccagtctggccaacatggtgaaaccccgcctctactaaaaatacaaaaaaaaaaaatagctgggcgtggtggcgggcgcctgtaatcccagctactctggaggctgaggcaggagaatcgtttgaacccgggaggcagaggttgcaatgagccaagattgcaccattgcattccagcctgggcaacaagagcaaaactccgtctcaaaaaaaaaaaaaaaaaaaaaaaaaaaaaaaaaaaaaaaaaagagcatctggggccagaactgagattggagcatctacttagttccgccacttggtttgtagcctgggcaagtcgctttacctttcttagccatggcttatccatctatacaatagggataagccagttgccaatgactaaatgggataatatgtaatgtgtagatggcaggaccttaagtcctctggcaaaaagaagaaagggagataaggggctgacctctatccctgctgctgttttgggtggataccttgagggaggtgagtcttctccatatgcttaaatccctgcttaactggaagattacctcaaaccttccagccaaagccgccccattgtcacagtagaggggcaaaactgctctttacctcattggcattgcacggattcaatatctaggtttacaccaggctctctactactgtccttctctccttgggtcctctcttcccacaatccctgacagtctccctctcgtgccttgcccctgtcctgtccaagggccagacctgggaagtttcttccatagactccaacctttgatccctctcagccctgggaaagagggaactggtggagaatttgaggccgtttaatgtatacctgtcatgcttgtgaatgtgatctgagcctctctggcaacttcagtgtctatctcagggcctgtttcctcttctgtaaattcattattcttgcaacccacattgactgggtgacaacagcagggcagcatggtgcacccagcaggttgggagtatggaaaaaacacaggatggaaagaactccactgaggccgggctcggtggctaatgcctgtaatcccaggactttgggaggccgaggtgggcagatcgcctgaggtcaggagttgaagaccagcctggccaacatggtgaaacctcgtctctactaaaaatacaaaaagtagccaggcatggtggtgcgcacctgtaatcccagctactcaggaggctgaggcacgagaatcacttgaacccgggaggcagaggttgcagagagctgagatcgtgccactgcacactgcagcctgggtgacagagtgagactccatctcaagaaataaaaccccactgtgaaactactgatctggggacaacagaccaatgcacacagcaggctctccaatactaggggtcggtgcagggacacctcccagattctagagcattccacagtgtcatgatgcttcctcctgtccttcctgagtacagcagactcttcccctagacttctgtcagaggctaattcatttcctacgggaaaagacatcctaaaatttgagtctggggcttttgttcattcccttttgttggaattccctatttttacaccagtcatccagtatctttatattcaaagggaaaacacaataaaaatacttccagtttgccagtagccagaatcaggttagctcatgtatctaggtttgcaaagctgcccaggacctttgttcagtgtggccctgtgtgtggctgccttagtctacccactggcctgtctgcccacccatccctggctggcctgccctatcttcagcgcctatagccctcagctccacttcctattaatacaaaccatgtgggaccctcactgtggcgtctccaggcaaaagatgaagccacagccgcctagtggctgccagggaggctggcaggaaggggcatctctacccggcgtctcctgggaaacagcgagctccccagagaagggacatttggaaataaaatttctgccgttgtgtgtcaatgtgtgtgttgaggcaggagagggagttaagaagcctccccagcccctctgttcctttctcctcaggaaaagcctcttggagcaactctcccactgcctcccaaaactccagccccttgtaggctctcctgggactggacaagtggctgaaaatgttccttcagattcatgatgcaggtgaagaagagcactggactgagagtcagaggccccagttctgagcttcctgacttaccccgtggctctggcctgttatacctccctttctgagtcctaagttcctcctctgtaaaatgaaattttttcatcattcctggtctctacattgggcctcctccacaaagtccaggaatatagttggggcattctaggccattctttcctatacttaggacagataactaatagaagcttataattcctagagtgaccttgactctaggaattctacagcgaccttgaatgagccagggcccttcacctgcccatgcattcattcaggcatttgtaggtgccttttgagagtgaagtctgtgctaagagggtgaagtctgtgctaagagggtctaaagctgccccaaattttttttttttttttgtagagatggagtcttgctctgttacccaggctggagtgcggtggcgtgatcttggctcactgcaacctccacctcctgggttctagcaattctgcctcagccctcagcctcccaaatagctgagactacaggtgcacgctgccacactcggctaattttttgtattttattttatttttatttatttatttttagatggagtctcgctctgtcgccaggctggaatgtagtggcacaatcttggttcacggcaacctctgcctcccgggttcaagcgattctcctgcctcagcctcccaagaagctgggactacaggcgcccgccaccacgcccagctaatttttgtatttttagtagagatggggtttcaccatgatggccaggatggtctttatcttgacctcgtgatctgcctgccttggcctcccaaagtgctgggattacaggcatgagccatcgtgcctggtcctatttatttatttatttattttgagacagagccttgctctatcacccaggctggagtgcagtggcacaatctcggctcactgcagcctctgcctcccaggttccagcgattctcctgcctcagcctcctgggtagctgggattacaggtgcagaccaccacgcccagctaatttttgtatttttagtagagacggggtttcaccatgttggccaggctggtctggaactcctgacctcaggtgatccacccaccttggtctccccaagagttgggattacaggcgtgagccatggcacccggccatttttttgtattttagtagagagggggtttcaccgtgttgccaagcttggtcttgaactcctgagctcagcagtccacccaacttggcctcccaagttaggattacaggcatgagccactgcgcccagcagctgcccaaatttttatgaaagaggcatctcagcttcctcttgctgtcctgtaccagaggtcagctgcatgccacattccttccatgatgacccccttcatgaggagctggagggactaggaaccttctcttcccctagtgtccaaagccaacctaagggagaagccatggtgtctcctgggaaatagaggtgggggtgatgtccctgccccctcctctctcactcccacctatttccctttgctctttcttgctcttgatagtcaagccccactcctagcccaatccactgctctcctgtaaaattatgggatgtccaaattagagacaggagccctttggaaccacaggcagaggtcagaggcgccctagtaaaagcaagtggctctctcccagctggaggccccctcttggtctcacctcctagagcttcccttcctcaagagactccaccttctaggcaggttggggattgctgagagggccctccatgcaggagacaacccccaaaacttggaggagacagaatagctctagggaggaggagggccatggtccctgcagagacccaggggcccaggcctccttccttcccatcttgtggcttctcagcccttgatctacattgaaggaagggtcaggcagtgggaagtcggagagaggaaggggaatgagggggaatgggggacgctcagaagcagggagaggtcctggagatctggattctgacttgtcacctttactgggcatctactgtgtgccaggctctgtcccagttttacatagattatgtcatttagccctcagcccagcgctgtgctgtggcattattattctgctctgacagagaaggaaactgagactcagaggccttatataacttgcccaaggtcacacagcttgtcaggagtgaagccagaatcctagcccaggtctgtcggcctccattgggttctccctgctgccaaaaagtcctcctcctggaaaagcaggtctggggttggggttttcagttggagctcatcaggatccccagaggcaaagctattgtcatctgccttcctcctcctcacccatctgccaggcaagtcgcaggtgagcccccaccaccatggcccctgccctagccccaggtgccagcactgctttgcctggctcccaccctctccctggtgcccccaaggtggctctgaggtcaccccacaccccagtgcctccattctgcatttctacatctccgaatgcttgggaaaaacagaaggagagaggaggtcaattgaaggttggaaatgtggactctgactataggtagagcattcgggggcctggttatcttcctcagttcaaatgaaccctttccccaactcccaccccctcacccccagagacagccagagctttgcttagttaatgaaatacaaaagaaggaatcaggggtggggggtggctccagagccctggaaagcgagggagagagaaaaagttgggtctcttccaaagagttaatgttccacagtatgatcgattaggtgtcagatgtaatttcaaaccaatacaagatgaatggcataattttccctctctcattttagacagaattaagaatccattagctaacacaaatttttggcaagtttaataggagctcaaatctacattcggaggaaatgctccccaaagcctgtttcaagcttttacttctcaggccccctgcctccaacgtcctcttaccaactcactgttgtctgtccacccaccaacccctcctcccccgccgcatgcagcccccactcccttcctctggtccccctacatgcccctccccaagccagcccaagattaactggcctgacctctctcacaaaggccgggcctgcccaccattgtctttcagtggcaatgggtgggggaaatgggtggaggggctggcagtgggcccaggagaggggagaggttgctgaattggccctaggctgcagacaaaccctagggagaggggtatattggggccttgggcagtttgagtctcagctactcctcagtttcacctccagaaaagttgtttttgtcctcaacaaagcattacccagttcatagggaggacacgagccccatccttgttgtctcttatagttacatacattaattcacagagttaacctgaggtaggaagaacagctatcatcccattgcatacatgaggaaactgaggctcagagggttggactttggctctgctgtttgctctcttactagcgccagaaggcacttacctctgggccttaatttcctcatctatgaaatgggaagaacatttagtaaccagctcataggattatcctaaggaacaaatgagatggtacacatcagagctttagcacagagcctagcacattaggagcgctttcatgactgcccacccaggcagaggtgccgcgtgtccgccctacgccagctttgtgctggggttgagacctggaacacagcctgaatcagctctagcctcagcccgtcaaattcacagcctggtaagggagacagacatgcggactgacccctgccctggaagacaaaagaggctggaaaaagaattatggtggcttacccttactaggcatttatggtatgccaaatatgggagcaaatcctttgtatatagtaacatgtttactcctcacaaccaccttatcagatagatactattatcatcacccccattttccagatcagggaactgaggcccagagaaatgaagtaacttgcccaagatcacccagctaccaaatggcagaactaagattccaattcaggcagcctgattctaaggcctgtggctcttaaccccaatggatggtgaagcatgaggatgtgatagaccctgcttggggtctaggaatgcttctcagaggatagaaggcttgaactaggtctttttttttttttttttttttttttttttttaagacagagtcttgctctgttgctcaggctggagggcagtggtgtgatctcagctcactgcaacctccgcctcctgggttcaagcgattctcctgcctcagcctcctgagtagctgggattacaggtgcatgctgccatgcccagttcatttttgtatttttagtagagaacaggtttcaccacgtttcccagactggtctcaaacgcctgacctcaggtgatccacctgcttcggcctcccaaaatgctgggattacaggcgtgagccacggcgcccggcgctgaactaggtcttgactgatgagttggagtttgctaggtgggcaaggagagaaagagcattctaggcggcaagaacagcatgtgcaaaagcaccgaaaggaggctcagcatgggaggcagtgagtaacgcgcttcttcaccaaaacatggggttcgtgcggaggatggcaggaaacaaggttggataggcaggcctgatgcttcattctgacaatcctcggcaagttgggaagttcttcctattgtctgactcctacagacagctttgcatgctgtgctcaagaactatgatttaaatcacgttgtcataataataggcatagctagcatctctcgtatgccaaatgctttatattgattatcttgtttctcctttacaataaccacatgaaccaagtactattatcccatttttcagatgagcaaacagaggctcggagatgcgaagtaacttggcccgagagagacagctagaaagtgacagagctaagtttcaaacccaggtctgacaccaagcccaaactcttaatcgcttgcttgctgtgtgctggtaggcaatgggggaactttggaggaattttcagcagtgaattgaattttagaaaaagaattctggcagagtgtagaggttggattggaacagggtgagactggaggcagagaagccagccgtgaaactgtttctcttgtccagatgaaagttccagatggagaacgatgggaggaaaggcccttccttatccatggggatgaaagagagggccttttggagcccaaggaataataatcatactataggcagggcgcagtgactcatgcctgcagtcccagcactttgggaggccaaggcagggggatcacctggggccaggagttcaagaccatcctggccaacatggtgaaaccccgtctctactgaaaatacaaaattagccaggcacggtggcgcatacctgtaatcccagccacttgggagcctgaggcagggaaatctcttgaacttgggaggcggaagttgcagtgatctgagattgcgccattgcacgccagcctggatgacagagtgagattccttctcaaaataataataatcataatcatcatcatcatcatcatcaccatactattaagtgcctaccatgtcctctgtaaggaagtttttttttttttttggacatggagtctcgctctgtcgcccaggctggagtgcagtggcgcaatctcggctcactgcaagctccgcctcccaggttcacaccattctcctgcctcagcctcccaagtagctgggaccacaggcgcccaccaccatgcccggctaattttttatatttttagtagagacagggtttcaccgtgttagccaggacggtctcgatctcctgaccttgtgatccacccgcctcagcctcccaaagtgctgggattataggcatgagccaccacacccggccaggaagtatttttttttaaataaaataagataaaaataagtgcttactctgtgccagtgagccatttccaacttgcacatgctgcaaagcagatattattagccccatttaacagatgagaaagctgaggctcagagaagttgaccaacttcagagccaggactggcctaaagccccagcctttcccttctaccacactgccataaggtgattgggccatacattagaagtcagctcttccctctcaacctggcttaatattccctgggtacatatggagctggtccttattttggccccagcaaatggcgttgagctgagggaggtagaaaagggatgagggggagtggagaagggaaactggagaggaatgaggtctggagttcggaggatctattgctgactattcaggaagacgtaaaggaaggcacacaggaagattagtggatttaattctcttagcccttaagaggagaagacacctctgccgggcatggtggctcacgtctgtaatcccggcactttgggaggccgaggcaggcggatcacaaggtcaatagatcaagatcatcctggccaacatggtgaaaccccatctctactaaaaatacaaaaattagctgggtgtggtggcccatgcctgtagtcccagctatctgggaggctgaagcaggaagatcacttgaacctgggagtcggaggttgcagtgagccaagatggcaccactgcactccagcctggtgacagagcgagacttcatctcaaaaaaaaaaaaaaaaaaaaaaggagaagacacctcattcctttacttcatttcctaacttttggtaaatccttccagctgtctaactcctatccctcctaatagagtcacaaaccaccccagttgccagttttaaggaagagctcctatccatgctccctaccatgagggcatacttcatcctttcttgtggagtaggaggtaaggagatgggggagtattccacctacttttattttttgagatgaggttttgttgtgttgcccagactggtctgaaactcctgggcacaagtgatcctcccacctcagcctaccaagtagctgggacacaggcatcgtgccagctcatctacttacttttatatcaattaatacccagaggaagctaggttcccagagtattccaccaaaaaggaggaaatgaccaactcttgccccagtagagagaagacagagaatgcttggcaccaggtgggtctcatcgcctgcccctcaagaatggttgccacttttgagatccttgatccccatacctttattattgagtccattcatctactcgctccacatttatttattgggcacctaatatgtacctggtcttgtcctaggtgcagggagtgctactaaaaacaacccccaaccccaaccaaggagcttgtgtatgaagtggggggagatagacaatgaacataataaatgtgtagaatacatagtgtgttagatggtgaaacatatacgaaaaaagaaaaaaccaaggaaggtgggccaggtgttgtggctaacacctgtaatcccagcactttgggagggggctgaggggggcaaatcacttgaggtcaggagttctagaccagcctgggctaagatggtgaaacctatttctactaaaaatacaaaaaaaaaaaaaagctggatgtggtggtggtgcatgcctgtagtcccagctacacaggacgctgaggcaggagactcacttgaacccggagaggtggaggttgcagggagtggagataacacccctccactgcagcctgggcaatagcgcaagactctgtctccaaaaaaaaaaaaaaaaaaaaaaaggaagaaaggaaaagcagtacagttttgaatggggcagccaggaaaagactcttagagaaggtgctattttagtatggatctgaaagaggtcagatatctggggaagaactttcctatcaaaaagaacagccagtgcaaagaccccgaggcaatagctttcccagagtgtctggaagagggaatgagcaaggggaagattgaaggagttgagtccagagaaccctagggtcagactgtctagggccttcaggttttcattctgaatgaaaaggtacaccacttgagggctcagagttctaggcagaggagtgacatcatctgacttagtatttaaaaatcattccagttgcctagggctgaggtattggaaggcaggtggagagagactgctaatgggatgggcttcttattagagtgctgaaaatgctcagaattggccagttgtggtggcgcacacctgtaatcccagcactttgggaggctgaggcaggtgaatcacttgaggtcaggagtttgagacgagcctggccaacatggcaaaacaccatctctactaaaaatacaaaagttagctgggtgttgtggtgcacatttataattccagctacttggaggctgaacctgggaggcagaggttgcagtgagctgaggtcatgccactgcactccagtctgggtgacagagtgagactctgtctcaaaaaaaaaaaaaaaaaaaccaaaaaaaaaaaaaactccagggcttggtggctcacacctgtaatcccagcactttgggaggctgaggcaggcggatcacaaggtcctgagttcaagaccggcctggccaatgtggtgaaaccctgtctctactaaaaatacaaaaattagccaggcgtgatggtgggcgcctgtagtcccagctactcgggaggctgaggcaggagaattgcttgaacccaggaggcagaggttgtagtaagccgagattgtgccactgaactccagccttggtgacagagtgagactctgtctcaaaaaaaacaaaaaaaaaggaaaagtgttcaaaattgtgtggtgatggctgtgcaaatttataaatacactaaaaatcattgtattatacactttattttttatttacgtatttatttacttgtttgtttattattattattatttttgagatggagtttcgctcttgttgcccaggctggagtgcattggcgtgatctcggctcaccgtaacctcggcctcccaggttcaagcgattctcctgccttagcctcccgagtagctgggattacaggcatgcgccatcacgcccggctaattttgtgttttcagtagagacggggtttctccatgttggtcaggctgttctcaaactcccgacctcaggtgatctgaccgcctcggccttccaaagtgctgggattacaggtgtgagccaccatgcctggcctacatatttatttttttgagacaaactctttgtcacccaggagggagtgcagtgacatgatcatggctcactgcagccttcaacttctgggttcaagccatcctcccgccttagcctcctgggaagctgggactataggcatgcactgtcaggtctgcctaatttttaagttttttgtacagacaaggtatcaccgtgttgcccaggttggtcttgaactcctggcctcaagtgataattctgcctcaacctcccaaagcactgggattacaggcaagagccatcactcctggcctgttgtatactttatttattttttattatttgttatttttaagatggagtctctctgtcaccaaggttggagtgcagtggtgcaatctcagctcactgcaatcaccacctcccaggctcaagtgattcttgtgcctcaccctcccaagtagctgagactacaagtgcctgccaccacaactggctagattttgtatttttagtagggatggagtttcaccatgttggcaaggctggtcttgaacgcctgacctcaggtgatctgcccaccttggcctcccaaagtgctgggattacaggcaggagctgtcgtgcctggccctgttgtacactttattttttaaatttattttttattttttgagatggaatcttgctctgttacccaggctggaatgcagtggtgcaatcttggctcactgcaacctctgcctgccaagttcaagtgatcctctcacctcagcctcccaagtagctaggatttaaaggcgtgcaccaccacacctggctaatttttttatatttttagtagagatgggatttcactgggttggtcaggctggtctcgaactcctgatctcaagtgatccatccaccttggtctcccaaagtgctgggattacaggtgtgatccaccgcgcccagcctgtcgtacatattaaatgggtgacttatatctcaacaaagctgttctgttttttaaaaagtcactctgactgttgcactgagaatagactatagacaggagtggatcaagggcagaaactggtcatccaggagagagggaaggcagtgggtagcagtggagggacaaatgcgctgattctggatttattttgaaggcagagcagacaaattccctgatgaatcagatgtgggatatataagaacataaactagaatagttgaagaactggagttctggaaaggaggaagggctggcctgaaggcatgggccttcaagggcagcgctgagattgcccttagaatttaggttctaagaccctggctttttattttttactgattgattgattgattgcttgattgattgatttagagatggggtcttgctctgttgcccaggcttgagtgcagtggtgcagtcttggctcattcaacctctgtgtcccgggttcaagcgattctcctgcctcagcctccgagtagctggaattacaggtgtgtgccactaggcctggctaattttttttgtatttttagtagagactgggtttcaccatgttggccaggctggtcttgaactcctgacctgaagtgatccacctgcctcggcctcccaaagttctgggattacaggtgtgagccacggtgcccgactgaccctggctttttaatatgaattttaaccctattatatttcagaacatctctgagcatcagtttcctcagcttgtactcaatcagctgcagagactgatggggacagacctgactcctataaggtgcttgtggagcattcactccattcctatcctcttcttttctggccttctaactgagactgctctgaaccaggggcccaggaaagaatgagggggaggaatatggcagaacttaggtcccaaagggagtactgggcagggggcttgggcattgttcctagttatctgattcctgcagtggggaaagaagtggaggacattgcccatcgcccttgagcctgacccatccatggtcaccctggctcctgtgcctccaccttccctgggggcagaaggactagtgccttacacatttggggttggcagaagattatcttggagccagttctcttcaacctagtgggagattctaggaaggcattaattaccaccttcctgctgatgctcggttaatgcgatgattcaaaaggtgtatttttcaattacatttaatgaaaagatttatagtcaagtaaaacataattaggaggctgccagcagactggtctcctgagaggaagaaaggtgggaccaagtcctaatgaggcaggttggagcccaggccagaggacctacttatccttccctacccctcttcaaagatgccgaagcattcatcaattccgacattcaacccacatttataagtacttattccatgctgggcccagagtgtacaatggaaacagaataaacactatgatccctgccctcagagagcttacacacgaggagagggggccaaccaaaaaaacaaaaaaacaaaaacagctgacagtttaacaaagtgctgcaagtgctgcaaagaaaataacaggatgctgaactagagaatacctgggggatctgccttgggcaaagagatcagacagtgtttcggggtgaaggggcaagctgagattggaaagatagaaatgagtcagccaacccaagagcgggaggtagttgagggaattggttctcagaaagcagcccaggtggatcatctgaggtcaggagttcaagaccagcctggccaatatggtgaaactccgacactactaaaaatacactaattagccgggcatggtgcaggtgcctgtaatcccagctactcaggaggttgaggcaggagaattacttgaatccgggaggcggagatcgcagtgagccgagatcacaccactgcactccagcctgggcaaaacagaactagactctgtcaaaaaaaaaaaaaaaaaaaagcagctcaggtcctaggatggggctcttagtgtttgcaaaatggaaggaaaagccagtgaggctggtgcaaggagagggagcaggagagacagaaaaggacaccaggaagggaggcagggaccatgattacaatcaggtttgaattctttcatcaccccaagaagcaactatacccattcaaaattactccccattttcctccacacccccaagctttaggcaaccagagttattttattctatatgctaaggactgggggttttaagccagggagtaaaatgacccagcctatatttttaaaagattgcctcaggccaggtgcggtggctcacgcccgtaatcttagcactttgagaggccaaggcgggcagatcacgaggtcaggagttcgagaccagcctggccaacatggtgaaaccccatctctaccaaaaaaaaatacaaaaaccagccgggtgtggtggcgggcgcctgtagttccagctactcaggaggctgaggcaggagaatcgcttgaacctgggaggtggaggttgcagtgagccgagatcgcgccactgcactccagcttgggtgacagagtgagactccagctcaaaaataaataagtaaaaataaaaaaggttaccccagctgctatgggagaatagatcagagagaggcaaggtgaaagactggagcagagactcagggaagaggtgatgtgacctggcttggggggaaacactgaggaagaagagaagagcctggatttgagatgcactttggagcaagatgcagtgattcttagtgagagtctatgtggagcgtgagggacaaggtgagcttaaaggtgactcgggtttctgtcttgaactgggtgctgccatttattgaagtggggaagccaagaggagaagcatatggaaagacatgtggataaagaattcagatttggccagcctaggcaacatagtgagacctcatctcaaaaaaaaaaaaaaatttgccaggcatggtggcccacgcctgtggtcccagctacttgggagtctgaggtgggagggtcacttgagcccaggaggttgaggctgcagtgagctgttatagcaccactgtaccccagcttgggtgacagagtgagaccctgtctcaaaaacaacaacaacaacaacaaagaaaatccaaatgcccatcagtgatagactggataaagaaaatgtggtacatatacaccatggaatactaggcagccataaaaagaatgagatcatgtgttttgcagggacatgggtgaagctagaagccattattctccacaaactaatgcaggaacagaaaaccaaacactgcatgctctcacttgtaagtgggagctgaatgctgggatcacatggacacggggaggggaacaacacacactaaggcctgtcagagggtggggtgggggagggagagtattaggaaggatgactaatgcattctgggcttaatatctaggtgatgggttgataggtgcagtaaaccactatggcacacgtttacctatgtaacaaacctgcacatcctgcacaggtaccccagaactaaaaacaataaagggttcatgtgaggcttccctggccctgagggatggaggcctggatgcccacaccaagggagtctcctctcaccaccacactctattgcttcctggcttgtcctttagcgtttttttgttgttgttgttttgttgttgttttgtttttaatttgagacagggtctcgctctatcgcccaggctggagtgcagtgatgcgatctcggcacactgcagtctccacctcccaggttcaagtgattctcatgtctcagcctcccaggtagatgggattataggcgtgcaccaccacgcccagctaatttttgtatttttagtggagacagggtttcaccacgttggccaggttggtctcgaactcctgacctcagatgatccgcctgcctcggcctcccaaagtgctgacattataggctcgagccaccatgcccggcctgtcctttagcttttttacatgtctaacttccattcttcctgctattcttggaaatgcatctctctagtttggagagggaattttggagagagaattctgtcattctcagttccctttaactgtctaagttcctgaaattctaccacaaaattcatactatactcgtattcattgagtacccactatgggtcagatactatgctagaagcgttggctacattatttcgttaaatcttgctgaccactctttccacagtattaataatacaataataataacagtagtaataaaacaataatagtgaccacttaatgaaaactcacttgaactaagtgctttacattaattgtcattttaaaatctcattgggaaataacctacccagggtcaaatagccagttaggaatgggatgagaaacctggacttctctccagtacaccagactctcttgggggatgaggactttggctgcatgggtggaggaagggcagaggcattgtgatgcctttctcttccttctcatttattctttcaaatggagcacagaggcagcaatatctttccagacttccttgggtgcagagggcaggcacccctgatgacaactccagggcctgccctttgctggggaaatgtgaccatttcttggggagggcacagctctcacaagacttaccagacccttagagcagttgcctggtgtcataggaggtaggttcccatctgtgtagtgcaggatcctgctctgtgatacaaaaggctgattcttgtattcatcctctgaggatggctttggtgtttgtgcaggtgcatttacccttctgtatatgtgtgtgtgcatttgtgtaataattggtgtgcaaaggaccaggtgatttgcacacatgcatgcaagtcagaacagcctggattctgtgcatttctctcaggatatgtgtgtgtgaagggatgattatctggttgtctggggcctcagaaaggcaggtaacttgtaaatttcctcaagcatgtgctggtgggtggagttcccacaggatggaaaaaggggctggccccagagttgagttctgagctcagctctccacctcttcctgcccgtctccagctcgctgcctccccctacttttccccaagctgggcagaatgccctcagcctgtgccggctggcacacatgccacatggtgcctggcgcgcgtctgggcaaggatgacgcccccaggaccggctgggataccaagccacccgctgcctcccccacctccagaacggagcgtccccatcccatcccctttcccagccagggactcggggagcaggcagggacacagcacagacagatacaaacacacagatgcacccagagacgcccacaggcgtgtgccccagagggacacagacacaggcgttcacacaggctcgggtacacacacgcacgctcacacccccccagagaaatttatgagtggtcaccacttgcacggatccagacagaacctgacccgcctaggacatttaggcaaatccacctggtgtctctgtccgtggtgctgaaacaagaatgtttgaacgtcctccctatggaagcactaacaggaagtagaagggagaaaaagacctgggaatgggtggtggacaaaaaagaagcaatggaggagaaagaagagaggggagagagaaatctggtggtaagggagatagaatgtaaaggattccaggaggaccaaggactgtctgaaccctgggactaggagaggaagaagaggatggaagatgatctcagccccatccctgtcccctgaatgtgtggctcctgtggcctccagttactccttccatatgccaccttgccctagatgacctgaaaatagtagggaaaggagatggacctgggaaagccctatagtggacctgcagatagctccctacctgattacttatctcaatttgtgttgggcaagtggacaacactgttgatctggatttgttctggggattgcagggatttagtgactgcttaatgcttatccatcagattggattatgggttccttttgctgtctcctgaggaaaaaacaacaacaacaacaacaacaaaaaaaaaaaaaaaaaaaaaaaaaaaaacttcccttcagagagattgcatccctaatagggatggctctcccatcagcagccccttagttgtggaatttatgtaacatgaggaatgcccactcttctggtggggagacatcttcaaggactgaaggggttatcatataactaggtggaaggggataagggaagacgggagagagaaaaaagagaaaagagaaggagaaagaatgtgtgtgatggatgagaggatgaaagaaggaaggaaagagggaggaagagggtggagatgcagatggcaagagtaaggcagggcttgagtgaaccagacagactcctgtgtccagggaaggggcagggaaagtgtgccagttggagcaaattgctcccctcaagtgtcccaggggcccagataagactggaattccagcctagtcctgcagctgttcacagtggcattcttcacccagagctttgggcaaaaagaccctgtgggccaggactaccgatgtgaggagcagctgctctggcgaggaaggtgaggtcagatgcagtcaagtgcatgtgtggtttcctcatgggtggggtgaggacagtgggtgtctcctggggtgtttccacctattcatatgtaagcagtggcaggaggcagatgccacatgcttgggtaggccctggagagtgggtactgggttaattgaggatgaggagcaggcagaggaaaaggaagaagagagcagagggagaggagtaagtaggaagaaaaggatattggatcgtcttctagaaagttctggaccttctgttattctcttttcttcctacaatttgagaaaaaggcctaggctcagctgggtatggtggctcatgcctgtaatcctagcactttgggaggctgaggcgggtggatcacttgactctaggagtttgagaccagcctgggcaacatggcgagactccatttctacaaaaatataaaaaactatctgggtgtggtggtgcatgcctatagtcccagctactcgcgaggctgaggtgggatgattgcttgagcctgggaggtggaggttgcagtgagccaagatctcaccactgcactccagcctgggtgacagaacaagatcctgtctcaaagaaaaagaaagaaaaagaggaagaaggcctaggctgccagctgggcacatctacctcagtgtctttgtctgtggtataagtataatgacagtcccaagctcatagggttgttgagaggattatcaactcatgtataacgctgagtcaattactaacatatcacaagctccaagtgtatgttaccttccatattgttgttgttgttacatcttggttttgcactggatcattggggatttctttttttttttttttctttttttgaaacagagttttgctcttgttgcccaggctggagtgcaatggcatgatgttggctcaccacaacttctgcctcccaggttcaagcaattctcctgcctcagcctcccaagtagctgggattacaggcatgcaccaccacactcggctaattttgtatttttagtagagatggggtttctccatgttggtcaggctggtctcgaacccctgacctcagttgatctgctcacctcggcctcccaaagtgctgggattacaggcatgagccaccgcacccggcccagttcaggaattcttcacgcataactagaccttcttgctatgcccttaggttcaacacttttaggtcttcctttgcacacatggaggactgtgatttcttagatcttcaaatttactcctgaagagaggcagccaagaggttttctggaatgcaaagcgaataccccatgataagaaaagtctagggtacaggtcactgagttttcccaccagaggctgtcacggaggttttcctggattcctgaagaaattggaccctggacctacatcagtgcctccctatccagcctggagcctcagccatctgccccatgcagtgctcctgtccgggccccacccaagcctgtgtgggtttgggtcatttcttccagactcctcttccaatcccaattccttctcttcattcactttcttcaactcaccctctgctcctttcttgtcccttttcttattctcaggaatctagttggaaggaaaggaattccctcactacttagagtgggattcccccaccctgcatgggcagaatggatggtctcctgctggaggtcaaagaagcatgtggagactggcctaggaggggcgaggggtggcagggcagtccccatgtccccctattctccccagctcctgtctcatcactgtcaccattcaatcatagcagatgggctgcagctgtgagcgccagcccggcacacaggctggtccgtgccacttgggagagaaggaagagaaagggagggagggaaggaggagggatgaagggaggagggagagaggaaagggaagaagaggaggaggaggaaaggaaagagagtggaggaggagagagatggcttggaaagaaaggagacttagtgccttttatgcctctctcttcccagcagaagagcagaggccagggctgggctcacaagctgggcagtgccaggcaagatgggcatatgcccttgattactaccaggaccgcaggccaagcctccacagcctccacggcctcataaatcagtttttaagtagcaaccacatggacatttcccagccgagaggcctggcctctgttggtgcagctagggcagccctggtggaggggcaggtgccaggccagggcaccaaagagagaggggtggtcattgaggtttggcgggaagtgaggctggagcttcttcaagtaaaacctggggcaggggctcctgccaatagagactaggtaagaaagtggcaagtggctggcagtgggtccaggactccctgctgggtcccccagaccctgtgctggatttccccggtgaagctgcttacagaggagggggagcgtgttgctactggaactccttccctccagctcccacccctctataagaacaaagagtcagggtgagtgtgagggcaatgtgtgcgcctatgcacttgggtatccgaatgtgcgcaccaggccttgaggggcaggaaggtgtttcctgatacccagcccaggcctggcacagacagggcacccaataaagttgcttgaatgaataagtgatggagtgggaaaggggccagttatgcagacttgcgtgcgttcacaggaattggagatttctatccgagtgtgtcctgactggagtctgtgtgtatgtgtgtatgtgggggtgtctgtgggtgctctggtatgtgggagggggtggggaagcaggaggtgagggagctggcgaaggggatctatttcagccaacgtccctccacatcctccctttcaggacgtcttccctacacagccctccccagagccacgattctccccttctaagaatccatcagtggggcggcagctcccgcgcccccaccccctgcccctgctggatcccgcggttgacgccctcctctcctcctccccgcactggccgcgtaggtggcctcgggtgcggaggtcccggcctggcgcaatcagttgcagagcggatggggcgggggcgcccagccttcttgcgcgcggtgtctcctccctgggtgaacagatgtctcggaattttagatgtgctctccgcccctcctcgcaataactccccccaccacccccgcagctggcaccggctgtggcgtggcgccctcctcctcccccaactcccaatagcaaaaccgggtgatggatccgggagcacggctggaggcttgggccaggaggcccgggaggcccgcggcgtggcagtggcggctcccagcgcggagggaaccattgggcgctgttcggacctcttcccttgtgtccttccttcccttctcccgcatccactcactcccatctctccactgtctatgtccttctcgacctctgccccaccctacagcccatcccagccaccgcgtctacgaagatcctctacacggaccctcacacttcacgacagaaactcctcctggcaactttggaggaattctttcctctagagaccccttttcctgcattcctgagccgccccccatcaccatcaactggctgcctgccctcagtagaaaccccgagttaatccggaaaacgtggggggaggacgggaggggagtagggattgagattagggaggtggagaagaccgggttggccctggctgagagacacccaaattttctaatcactgctaattaatgaataatccaattccacggacccccaactcagggaagggggcgggacccacagcgggcaggagggggccttggcagggcttcgcagtcggggtggtgccaggagccctcccccccacccgccagcattccgaggtaacaggcatttgttacccagctcgtgccaggagcgattggcaggttcgagcagcacagtcattccgcacacagatgtccctgcgttcactcttctgatatgaattctgtcagctccgaatccgagagagacaagcagacagctacacagacagagtcacagacagacacagacacagatagagcaattgtctggaagacgcagaactctacagatatttttcttccctgaaaacatattttaaaaaagaaagaaaaataagaaaagctcccattaatttggggggacagtccccgtgcccccgatgaatgccccccttcctctcctccttgtgttacctgcccagacatttcagcggccccaagggccccacaacatcatcacggagcttcaaagttaagtggtggcagagagaaactctaaagtccgcgagatctgtcccctcacgcaggacccttttgtagttctagaaatccagtatccctgagagttctagaacaccaccaaggtgcaagttccagcattctagaacctctgaaattcaaaattccagaactcccatgaattgcaaatcgtgctgagtgcccagttcttatattgccctcttcgtgggtgcgcgggaagtggatgctgtccggtgccccgagcggttcgcactgcatgcctggtcctcaccggctgcctccagaaccttggccaccagccaaaagtgcagcctgccctttgatttaggaacacagaaaggtcaagtctccctggctactgtccctttctgacgttgccttccagagcggaccccattcctgctcctgtcccaccctggccctccacgcctgacctggctgtcctgcctctgcccctgccagcggctgtgggagtgagctggttggtcactgggcatctgtgagctggctgggcatgaacagccctggggtttggttctccctggtcatccctacttagtggacgaagaaaaagggggcaaagaaactggtcacgacagaggagggggcacagaggggtttgggctgtggtttgtggggttgtgttttttaatctttcctactttctttttttaaaagaaaaagcccccatcctgtgtcatcatttttatgggatctgcaattctggcaaaaatctgtctttaatttagctgtccatataaaaatcctcactgtataataatgaacagatgccatggaatttaagctggagcctcggctcctccccgccttccccccgcgcctggcaccgggcaccgggcaccggctgagtggcacagactggcaccaacgcgcgagggtgggcagggggcgacctgggctcagcgccagggctctggggtggtgaaggggcgtccgggcgctggggttggccaggagggagcttttccgtggtggtaccagggagaagtgtctgcgggatttttctgtctttttctacaagattatcagtagttaaggattttggtttggttttgctttggctctttgtggttcttccgatatattttttaaagcaccgccctccattccatataaacccaaatgtttttgatattttaattgagttgtttttaaccctccccctgcgccgcgccccagcctcggcctgggagcccggccgagcgcgagttcgctgcaagcgggatccgctctgagcccggccggccggcagcctccgcggtattcccggcgcgggcccctccaggggctcccctgcggctcctgggggcaggggtaccctgctgccctccaagactgaggctggatgtggcatctgattgggaagtgggagagatgaagggaagagagaaagccccagtgccctcactcccattctcgggctgttcccaagggagaaggaaaaaactatgtgagtccgttgtgccctcctgcctccgcctgcggtcaagaaagggggcaccggctcaggcttgaggggttggttctgagccccccacccccacccctcgcttttaatgcgactctggcgagaacagatgtcccaaaccgggcgaactgcccagaccccgcccagctgtgcccttggtgaagacttggctaagagtaggaactggcatgcaggtccccaaaggggttcgggggttcccgcgacccctgtgggacctgacctagcagccttggcctcctggccagctcagcctcaggcgggaggcggaagagacccggaaagacccgttcctaattcaattaattccgaaaagaggaatgagacgcagacagatactgacagaagctgggagagaggtttaaatacccgaacaccagacacacactctggtatggaactccgcagcccctgtcagcgcggggagacctcgctgcgctcccgcgctggagagggcaggagagttggctgcgctagagccataccctggctcacatctgggcagcgtctccacccaacgctgtgccccagctccctgggcatggccggcgcctagaggttccctcttctcctcccctcggagcgccccagcttcccttccctgccctagggaactaaggtgactccgctcctcgcatctccctcctgaaatccgttgccctccttcctgtgaacccagccccggtcttggccttcttctcacgtccacactcccagggctggcgcccctgtcccagtgctttaggttggagaaagtttccagagcagaacagccctcccaaggcagctgcgccctttcttaccacttctcacccagggaaactttgtcgagaatttttaaagctgcaggacagaaaggcagaagctgcttcaggattcagaaccggggcagggttttaaggtttctcacagttcaggtgtcatttctgctctggccccgtggccagcgcctgggtatcccagccctgaaggatggaaaaatgacagtgtcttgggctgtgagttggggagcctgttctgacagcagaggcccatctgcccctcccacttttcgcaaaaagcagcatcctcctttgagcacactggagcaggtcagatgcagtccctccgcgctgcccctctgttgtcatggaggggttgggagggtaggtcaggctaaagctgctcagtcctggcgtctgccttctctttctcctcaggtgccttaaggactaaactgcagaatctagaaccataccttagtctcaatcccccctcaaatcaatggctctcctcagagcagatgaattcctgtcaatgattctggggaagaggaggaagcaaaggttgccaagagagaacgaaatctctgacctctgcccagaaattcttgtatccaccagcttgtggactttcccatgaaagggaaaaagagaagcaggcacagccccgtggagcttccagagtatcagggttttcctgccactgatcctcctgggggtcggtgtcccgcagtgatttatcgggctgtctccccgagtcacaaaatcagggctgggggttcactgggggtccatagctcactgtccgagtcatggctggaacgcagctcaacaatgaagggacaggaatggagctcaacagtgaagggacagggagtaactgctttccttccctttcccgccagatgggcaaatggcctggactcggagatacctctttttctctgtcatcttccaaatgctggacttggaatggggtctggaaaatcaagaggaagatgtcctcctgattgaacttggatccagccgtcgggttcagcggcccaggggttgagctgagccggctggtggacgcttggagagcctgccgctgaggctagggcaagaagggcgtcctctctgtgccttctccccaggccaggcacagcgctggcccctttcctcctccctcccctgcttctgttcttggagcatctctgggtgtgtgtgcgcaggcgggagagcaagcaagagaaagagacctgcgaggggacgtttggggccgcttgtccgcgcacatcttcttctcctgctcatcacaccatctcgccagggaagttgagcactggggaggagggtgatgagaggctagagccagccagagtgcagggaatgtggggggaagggtcagaaatcgggaaaggggcgactggtgtggatgccgggattcaccagaagctgagtcactcggggggatttctgtcccaaaagggacctgtgcacccccacccaatgtgatcacagctcacagaggcccaaaagtcatcagcatctttctaaaagggctggaatctggcttcaaaaacagaattgagccacgtagggtagctgaagaacaatgcatagaaagaagtctgtggtctggccaggagagccacatggaggggtcctttgcttcaggccccaagccacctggatcccgcccagctctggacttctgagcgggttctaggaaactgactgagtaggggagaagcccaattaaccttgttctcagggcaggataagaatcaggcctcgggataagtgccaagttccttttctctgcaattgcccctgccaggccttgctccacgccatgagtgcagatcagacttttgcaggttaggatctggggtatgtgccttgctctacactccctgcaataagtgagggggaaggaagatgggccaactcctttcttccatgaataggagtgattcagaggtttctaagatgctgaagacagggacacatccgggggatgaaggccctagtctgtgatctcactctagagaggcgatgccgggagaattccagagaaggcagtgaaattttgaaagaatgctggtaaatgttctgaaaactgctggagaattccagtgcagcattggaaagggcctcctgctccatgttcccctgggtcaggcaaatggacctccctctgcagccagaagaaaagacactagacgagggtcagcatgccacagtggacagctcctggccttggcgcctctgccgacagctgtcctgaccaccgggagggtattctttctactgggggacagaagaggtttgaggacagacatttaggggatgcaatgagctcaagttcagagtataatttgatccacccttcaatatataggacttccttcttcaacaatctttccctttcctgcttgtcagggagatattattttgggttcttggacccaatctttaaaagcctttgcatgcctgaccttaatcctcaaccccaacactacaaaccccacttcagccctaaaatgagtcacagtgtttggagaaatcatttaaatgagcagcatcagaaacagcctctttgggggactcctaaatgtgttcaggctttaggatgggagtctttggggctcagaaccctcttcaaatattctagggctacagcatgcactgagggctgagcagggggagtaggagggactctatcagggaagtcagttaagagctgcccctgcctctcaggttcagagaaaaaagaattgtgaggccacattgtctgagcaggagatgctcacccagtgcccttcctcccttctaagcccttagggttccctctgttcagaactgtaccagacaggaagaaatcagcccagatttggactgggtgggcgcctgctgccctgtcccagggagtacatggttaggctcctctctactgggtgggcgcccagactcagccacctcacagacctctaggggtgttcctccaaccttgtccacacccctaaacatgtcaacattcctgagaccaaaatggccgattcccctgagtccaccgaaatacaattttaagatgaaaaaggggcctccctcattaatatttcatcttcatgaccttataatgttttgttttgttttgttttgttttgtttaaaaatacccctgtctgattcaaatggttgtctctttgtctctgcccacttgctttttgcaacagtgggcagagagttgtaaaatgactggctgttcccaacttgatcatttttcagtgatgaaaaggtattttgttttcaagggaggtgcctgtgcatgttcaggaatgaagaagtgtaaggatatcagtgctttagtgctgggaaggtgcgagcctgggttgggtctgggaggggtagctagtatagcccagtgggtgtatggggggtggttagggagagaatactacccaagaatgtccagggtccctctgtttggcctctgcacagtcacttgacactctgccttcatcaccccagccccagctcaaaccttctctcccccctcaatgaaatgaggccaccgtgagaaaccggtccggctttgcatctcatttacataaatatttattaatcgtcattaaactgaacagaaacacgcaatgcacttcgggtgtccgacgggagtttcatcttcgctacaagaggaaggtaaaattgcgtgtgtgtgggtgagtgtgtgggtgtgtcgcctgtgggattgcatttttgcatcgtgtatttggatgcctgatcccctgcctccggtgggcagagggtctccttttgcccctttttgggggaacctccagtaggagccctcagacctctccccgcccacccaccagctaaagccaagaggactccttggaccaaaaaatactctctccagacaccggaaatcgccaggtggcacccaccgaggcacagtccgggcaggggtggggctgcccccaggtctccatccccacccctcaccccaggaggggacagaatggccgcggggaggaggagccggcgagctcacctccttctgccccccggacgccggcgccgggcctgcttgtgcgtgcggtgtggtgtgcgtgtgtctttcatgcaaaccctccctccccaaaccgaccccccaacagtttgccattccatacaaatttggaaacaggtttttaaaaaacagcatgacgcacaacggggacggggcgggggagggcagtggcactggggccccaaatctccgagtcactgattgtaagaacctggggagggggagggggcggcgcgggcccccacttcaccaaagtgcacagatccgcgctcgggcggggcggcccgcaggccgggcggggcatcccggggccgggccgggccgcgaggctcagtggagcctccttgcatagatatttgtgtctttgattattggtagtagtggtttttttttgtttgtttttttgttttttgttttttttgccttttattgcttctaaaagtccttactgcgttttctctccgatccggactctgcgttcggcttccgtcgcctcttagcttttttttttttttttttttttttttttttttttttttttgtatgtttgtttgtttaaaaaaaggaaaagggaaaaacggattctagttacaaattgtcttggcctctctctttcctctcaatccacttcccctcccgccaaaattaaaatcgcaaaacgcggagactggaggttgggggtgagggcgttccaggcccgggctccggcgccctaacttctaccctcttcaagaaagagggagcgcctggctcctttttgcctcggcagctgggtgtctgtttttaaaataataatgagagggggaaacgcgttccattgctcagctgcccccttaccaacgccttgggcctgcagggaggagggggaggaggaaacctcagcgaagatattgggaatgggggaggggtgcctccagggagcccccggagagaggtccctggagaagcactccttgggagagaggaggagggaaccccttggggagagagaaggcgagtcccctgggggaagcgaggcccctgggacaggccacccacaggtaacaggactgcgctgccccaggagagcggcaggaccggtggcccgctccccgcgcccggcgccggggtaggatgggggtgtccctgcgctctgggggctggggacaggggggcgggcaaaggcaaaagaaaaagaagggagccggcgcgaagtctcagttatgaaaaaacgcattgagctcctcgtacatggggccccggtcgtggtgaaggtgcatatcgtaagacaagagattctccgagtggacgcccccgcgcacagccgacgagccgaagactagcccgtggcccgtgggccgcgaaccgggcagcgccgagtagtgcatagagtagtggtagcttttctcgtggtcgggcgaggagtcctgcttgagtgagaagttgccattgagacagagcggggggctgagcgggccctcgtactcggagctgttgtagtccgggctcgcgccgccaccgcctgccgccgcatacagcgtctcgtaggcggcgcagtagccgtgggtccgcagggcgtgcgccgcgccgccgcccaggccgccggccgcctggcactgtgcgcccgccaggcgcgagcacgggtacgggtaggggtgcatggcgaacgggccgcccgagccgtggaagcggccggcaccgtcggcgccttgctccgtgaggaagttgcgagagttgagctgcagacagccggccaccagattggtggtgggctgcgacagacccttgcacagagtctgcacgtaggacactaggtctggccgcttgccggagcgcaggatctccgagagcgcccagatatagttcttggctaggcgcagcgtctcgatcttggacagcttctgcgtcttggagtagcagggcaccaccttgcgcaggttgtccagggctgcgttcaggtcgtgcatgcggttgcgctcccgcgcgttcgccttctgccgccgaagcttggagcgctccaagcgcgccttggtcatcttgcgcttcttgggcccgcgcttcttgggccgctcgccctccgcctcgtccagtccttcttcctcctcctcttcctcctcctcctctccccccagctcgccttcctccttgacctcggccaacgtggcctccgtcccctcttctccacggagagggactggcttggccgcccgggctggccccggagcccctggcccgggcgcaggcggtggcggtggcggcgcgtcgcccttgtcgctcctcggctcgtcgtcttcgccgtcgccccagctggcgaacttgggcacgtccgagagaaggccgggctcgctgaacaggcgggtcagcatggtgcctgagggcgccccgcgggcgggaaggggagacagacagcacaaagtgaggggcgcgctggggtaccgacgcccccccacaaccctcctccacccccgagtctcgtgcgggctcctgcctaggctaccctggatgcccacctccgccgcctgccccgcccagagccggcccagccctacccggctgccggcctgggatctcggcccaggccctctccccggcgctgggccccggctccgcccctcgcttgaatggggggctgctccccgcgcctgcttcttctcagggtcagggcagggaccgggtgggggttttagggaccagatatctttgccaggggaggcggcgcgctcgccctgaaagcccgttctctcctggcggtggagagaggctggtcggccgccggtggggacagctgccccgctccgcgctctcgcggcccgggccccccggcccagctccctcacccctcccgtggctctcacccccacgctccctaatccaatttgcaacttggctgcgcgccgccccttgctcggcccccacccccgcacccccaattccagaggcgggaggatcgtctcctctagccgatgcgtccccagctcccggagccggctctgggcggcgaggactgaagcagcggggcgtggggaggagactgagagaagcgagcccagtccgtcccctctgcggtcagggacccccttcccccttcaagctgactccctcccacaaggctcttcagatctcgttgtattttgggattgatgggggaaaaatccaaatttgtttgtttgcttcccttttttcggtggtggggaaaggtggcaggctttttgggacaaccatggaggggtcctccgtctcggcctcttcgcatatccccctccgtgatcctgccttccccccccaccgagcccatcgcaggcagagacacctcctctgcagccccctgggctgcagcccctaagggagagagaacctggggcccctccgatgcccacccaatgaggggggcatcatcccaggaaggaggtatttgaggaccctcctgtcggccgaagctgccgcccctcctcccaaccggcgggtcagatctcgctccctttcggacaacttacctcggagaggagtcaaggggagaggggaggggagggggggagggggcaagagagagaggggggagaagagggatcttctcgcttatttcattgttcccccatcttcagggagcgggggcagcggctcctcaaggcggcgggcgccggcgtcttcagagcgccatgcgaaccgcggagcgagtgtggcatctctaccaggcggggtaccagcctctatgccaggccatatgggcttggcacgtcacgggcagcagctatcacatgagagacggtgattggcatgcgtctgcactgggggagagccggctcccccgggacccgccgccatctgtcactctctactccaaaaaaaaaaaaaaaaattaaataaataaaggaaataaataaatatttctgccgccctcccctccccgcccaacgcagggaaagcagggattgagaggaaggtgggaggagttgccccctgtatatagagaccccctcacgggaacaatggggtggcaaggctggacactgggggctcgtggtggccaattctatgctccctcagggtcccgctctgtccatttcctcccctgcaggcccccaaggtgggtcagggaccagaccccgggttggggagaaaggacctctgtgcttgcccccactccccaggagggtccccttggccacaaagggacagctgagaccccctcccaggatggctgtaaggggcgtccctggcccgagccccataggtagatgttggcaccatgccatccctcatccctgtctgcccctcccccacccaccctcacgcacacacaacatatgtggctaaacgaaattcaaaccaagggaaagacagagaaagggaaagatgtgcctggatgtctgtgcctctgcatgggcgtgtgtgtgtctgtggggacatgtgtgtatctgtggagtcagccgatgggagatctttccttggttgttgggggcgtatccatgttagggtggagtggggaggggccgcgagatgagcctgtgcaccacccatctgggggtggaggggagggtctaagtctggattcctaacctagaaacctctcactctcctcctcccactgccagacaggtgaccagtccaccagcggctttctctcctggtcttcagacttggttatttgagggaggaggagcaggcagtgctgagaactgcctaagttcctggatgagactcaagcattctcctccccttctgaaaaatctgaaaatactgaagccaaccccagtaatcccaagagtggccaaggggaggtaggtcagacagctgtcttgataagggaggtaggaagttgctgttttatcttgtggctcacctttcaacactctcattgggccagacacagatacaaatggcacaggttgaagaggtggctttggacacacacacacacactcatgcacacacacatacacacacacacggatgcatacacatgcacacatatacctgttcctcaccctgtggtgtagaaaaatagataacatacccctactcagatagacacatgtatgtgagcaggtaatcacagcctggtgtagacagacccttgcccacaccccatttggagcatttgtatgttttagacccacatttctgcccctccagacactctagctgacatatatacacaacttcaattatactttcagcacacacattttgatgtctaccatgtgccaagcactgtggtggtacaaaaatgagcacggggaggcctttaccctcaatctgggtgggcagggctctctccctctaggaggctccccagggaccttgggctggtaagacactgatctgatgttgggtaggttggattaagttctaaatagagacacacatcaggaggccttggagataggggtgctggtgctgcctgggactcttgagtcacttggctgggagttgaaagtagcctgagaatgtacctctccaactcctcatcttacagaggcccatggagggaaactgacctgcctaggaacacacaggggaaacacagaactgggcctagaattcaggcacttgacccacagaccagtactccacttataagcccacaatctgcctcagtggtctctaaaaataagcctaccatgcttcccttcattcacgaatcctgggtctgcaaggcgaatcccatctctggcagatagtcgtggtggggagattctgggcatggcagagaaagaggccaaaggatgggcttcaggtagggcagagactcaggagtgctggccagcctccaccaagtttgggcacagcctccaaggctttgcaatccttttactgaagcagggtcctcaatcctgactagtagcctttttcctggagtctcctggctctgtgatatttcaattacatgcccatgctctgggcttctgattcctggccaaccccattaccaacttaaaaaaatgttggtcccagccaggcatggtggctcacgcctgtaatcccagcactttgggaggccgaggcgggtggatcacgaggtcaggagattgagatcatcttggctaacacggtgaaaacccatctctactaaaaatacaaaaaattagcagggcatggtggcgggcgcctgtagtcccagctactcgggaggctgaggcaggagaatggcgtgaacacgggaggcggagcttgcagtgagccgagatcgcaccactgcactccagcctgggcgacagagtgagactccgtctcaaaaaaaaaaaaaaatgagaggcccagcatggtagctcacacctgtaataccagcagtttgggaggctgaggccagcagatcccttcagctcacaagttcgagaccagcctgggcagcattgtgaaaccctgcctctgcctaaaaaacaaaaattagccaggcatggcggcgcatgcctgtagttccagctactcgggaggctgaggtgagaggatcgcttgagaccgggaggcagaggttgcagagagctgtgatcacgccactgcactccagcctgggtgatagagccagaccttgtctcaaaaaaaaaaaaaaagtgctgaatgctttgagcaagttatataacatctcttggtcttgatttcctcatctgtaagatgggataaattatgctacaccttcatagggttgttgttaatactaaatgggataatccattccatgaatgagcctccaataaatgccaactcttaattaaaacaccttgggaactgtaaaatgctttacaatattaattttttttgctcatacccctccccacacacattcagaatgcttggtctatatagaaattgaatttttgttgaattgatgggcgagtgaatggatgaataagtgaataaatgcttccttaggggagaaagttttctctccctgccttctcccttggaccctgagggctgggttaaacgcttcaggggtctcacaggcaggaggcaaaaacttgttcaagataggggagcccttggttggggggttcctgccacccttccggccacctgtcaggaatgacctcaactctctgggtctgagaagctcccctcagtcacccagagaaggaggtctgaggttgggggtgtgcacctggggacttcatccctttcgctctgtctcctgcccctgtcttttcttccttcagaaaaatggaacaagtttttctcactcgacacatttcaacttttttttagaagatacaataaaaaccaggggaaaattggaacagagggaggtgtgggatgggcctgcttcagacatgggcttgaaagaggcacaacacgtgtgttcacatacacacaagcaagcatgaacacgcagggacatacgcgcgcctctctgtgcaccagagatgcagagatgcagtgacggagagacagaaagagccagaaatggaaggaaggagacggaaggagaaggacacccagagatgccatctgttcctccccctggcattgggggaagggagttggtgaggggcctggtcccctccaggtctctgagagaaaaaagggagtgatgggcacctcagccaggcctggaaggcccccattgctgctgcccactcctcttggaaggagctaggagctggggggcctgaggttcccatggagacatagccccatcccaagggaggccacagtctgggcacctaaaatggctgcctcagaggggtggcagccattttgtacaggctcaggtcctgggggcaggggtgaggggggcagagtgtgtgtggaggggaggtgggaggtcatacctgagcagtctgggggactcttgctcaggggacaggaagagtgttctagaaactgctcttgttatacccccgctccaccaaaatacatacataaatctttaactgctccactccattctgacacccagaaagacagctagccagtcaccaccccctcaataagattggtgggggcaaatgtgctgaaggagacttcatttcccaccaaagctccaggcagggagaggggcggcaggtggatcaaacccaggtgtccagcccctggcctcagccacacatctatccacctcctggggcctctctgggctgagtggggccagcaggtgagaacccagcgagcttgggagcacggggagggaaggggccacctgtcttctcacccccctcctcagatttgaggggaagggcaggaatttggagatccttgagggacctgtgttcctgccattagccgtgctatggggggaggaggaaagggagggggcaggctggcactgcccagcagtgttccagcagttcaggatgctcgaagattcctcctaaagcatcggagcacctgccacctccctccccagcccctgcctcacatcaagtccaaaggatgctgggggagggggacctgcagcttcttcctggctctggggtgggcacctgccccactgccccctcctccccgcccgccgcagtatgccggggagcggcgggcacgccagatggcgtggctgagaatgcggcgacgttgccgggaggtgagggctggcacgggtgatatgcggctgcgtgccttgtggtgccatgggggaggggagggcagggccagtgaggtgtagccccctcctccgtgctgacctcctgtcctgacctccactcaccgccaggattctcttcaacttcctccgcctgctccctgggctcccactgtgggcctagaccccacccaaagatgggtgggaccagcctgatgctgagagaccgaggtcagacctctgttgcatccttgtccccctgtcccacccccaatcagggacaaaggatggatagaggagacccaccagtcctgcaccaaagccagccccctccgaattgtttccttgctctaaaggtggcgtgacctttgctcccgtaacctttgacttctggcctctgaaccctgtttttctgagaagagctctttccctgatgggcactggtctctgagtttccctttggtcaaatgcattctcattcctcactaagatgcttcctggacacctcctcctgggagccttccctgacctccccaggcaggggagcttaccaccctttgttagaaggacccatttacccatctgtctccttgcctggaccctggtgacgacttgttctgtatctctttagtctcaagcttcgtgctgggcaacatagtgagactcctgtctcttaaaaaaaaaaaaaagcccaagaaagagtccgcaccctttatgccaggcagtccttcccaggtccatgcctggggctgattcaacctgcctggtgccacgcacatagctctcactgagttggtgcttaataaatgcttgttgcattaatgcccagctgggccagaaactttgggtcctggaacctttctcctgagactctcctaaagcagaaaggctgagggtcccggtcaagcccagagtcctcagccccttcccttgccttttgcacaaattgcagtctgaggaggtggacttgggatgggggtcacagattccccccaaagtagggcgaggaggctgagcctgggactgccagactcttgctccctggtaccaggccatgatcctgaggccacagggcctgccctgctgtggaccccctgcttggtcaccacaccttcacctttcagcaggctcagaaccccctccttcttaccccacgacattcttgccctgcatggggcactctgaggagagatgaggtccagggacacagctgcgtcctgctcccgctgctgcatctctgctgatgctgctccccagtatctcagaacccttcagccttatgggcctggcccaggccctcctcctccgggaagttggccctgacttctgtttttttttttgagacggagtttcactcttgttgcccaggctggagtgcaatggcgcgatcttggctcaccgcaacctccgcctcctgggttcaagcgattctcctgcctcagcctcccgagtagctggaattacaggcctgcaccaccaagcccggctaattttgtgtatttttagtggagatggtgtttctccatgttggtcaggctgatctcgaactcccaccctcaggagatccgcccgcctcggcctcccaaagtgctgggattacaggcgtgagccactgcgcccagctggccctgacttcttaagggcccttgctcctctggcttacctcacgggaccaaggctacccaccctgcacatcctatccaaaatgcaaataccatgcaaacatggtatttgcctactctggtgccttccatggctcccagtgtccctaagatgaggccatgctctttagggacacccctgatttggctgctgcttttatctgtgccctcagcagctccaactatttctggatttacaagcctcatgcctagtaatctttgttcaggctgttctgtcttcctgaggtgtccagtccagcttcctcaccccttaagcctaagcatcacctcctccaggaagccgctctgggcagcacatttcacgaaggcaggaactggacccagagcctggcacacagaatatcctcaatatatagctgtggcaccaagatctgtcctgctcctgttgggagggtggtggtgtcagttcttctgcccccaaaatggaaggctgcaagccagcacaggacctctacccacaggaagtccctcctcaaaatcttccctcttttctcttcagcttccccaccaatatcagcactgacatggaatgtcagttttcccctctgtaaaatgggcgtgctaataagcttcaaatgagctaacagctctctccagaggtggctgattttgcctcaggcaaaatcagtgttatttttttccttttttcttattgatttatttgtttgtttgtttatttttgagacagggtctcactctgtcacccaggctggaatgcagtggcacagtctcagctcactgcagcctccacctcctgggctcaagcaatcctcccacctcagcctcctgagtagctgggactgtaggcgcacaccaccacgcctggctgccttttgtatttttggtagagatggggtttccccatgttggccaggctggtctcgaactcctgacctcaagagatctgcccacctcggcctcccaaagtgttgggattacaggcgtgagccctgcacctggcccaatgttatttttttaattttgttcctgcagctctcttcatcaccatatctttgttctgcttctcttgtgagttttccatggagaagttgatatgtcttgttccagcccctcccaaacccactcccagagtccatacaggaaggcagaggaacagggagctcaaggtggcaactgtaccagagttagcagcgttgtgaccttggtcagatcatgtaaccccctgcttcctcatctgtaaaatgggactagcaccacggttcacctggtcacctgcagttcagcactgatgggaggaacaaaaggacggcaggttatgaagtgcgcacttgggtggccaagtgctggcggatgggggttggggaactcctccctgatgctgcagcgcagggcagtggggacagcacaggaccaggctgcatcctgggccctctttccttagggcgggctctgttgtgaccttccctgtgacctgggcatttcccagtttctgcccctggaaatcagagccagggatctgggctggggaattttaggggcttggtgctggactattccctgaaacgtcccttgagcgcatgggtgcaggggacatatgggcctgacagtaggcacggatgacccacaccatagtggtgatgctagtgctcaggaggacagccccaaaaggtcactggggcagaatgtatggtgtgtgcaggacactgtggtcagggcaggaggtcacaatttaaccagagatctcttgagtcagccccaggagtggacctgggaaggactgcctggcatgaagggtggagattctttctttctttctttctttcttttttttgagacggagtcttgctctgtcgcccaggctggagtgcagtggcgccatcccagctcactgcaacctctgcctcccggctcaagcaattctccagcctcagcctccagagtagctagaactacaggcgcacgccaccacgcccagctaatttttgtattttagtagagatggggtttcaccatttggctaggcaggtctcaaactcctgacctcaagcgatccacccactttggcctcccaaagtgctgggattacaggtgtgagccaccatgcccagccgttttttgttttttttagagacaagagtcttgctatgttgcccagactggactcaaatacctggcttcaagcaatcctcccacctgagcctcccaagtagctgggactacaggcccacaccactgtgccctgcctgactttttaattggggtccacagggagggaagggaatagtctagagaggtagggtctcatgggctcactccccattttacagatgaagaagccacagagaggggaagcaacctgccttgtgtcacacaataagtgagtggcagagctgggactggaaaccaggactctgttgccactttggggtcctctcattcccagagcctcagcactctgtgtgataacatacttattaatgtaataatgacaatggtgagtgctatctgtgccaggcactggccttcacaggaatcattttattcttgacaagacatctgtgggagggattcctagtaccaccacttaaagaccaggatgctgaagcacagagaggttgccgtcaaggctgatgtgtcaaggtcacatagctagaaagtggcagagctgggatttgaaccaagtttgacttgactccagggctcatgctcttactattataaagtgtgtccctttctctgaaaccgctgtggtctccacaccgtaggaccagcagaccccgcaatggagagggaaaggagggtgccctgggaaggacttgtgcccagggtttgccctctggcaactggcctctggccaggtccccaagtcacaggagccatgatgccctggcctggatctatcaagttctgctcatgggtgggtaggtgggtggaggctgcttctaaacacagagagggagcagtcacattaaccatggagtttttccaccctgtatataccactttcctcagcttcttcagaagactccctcctagcccttgcagactcagtgaggtgctgcctccaccaggaagtcctccctgatgtcccctgatggcgctccagcctctggcccttggcaccgcgttgaacatttggggatggacagaccagcttcaggagccccagcttcaccacttgctcaccagctacctgcagcccccgcccccgtctgccctcctgtctgtaaaatgggaataagaagccctgcctcacaaaatctttgcaaggaggagcagcggcgtcctaggagcaagcacctggcgcccggtgagcccccgccactcgctccttctcctccttgtccttctcctggcttgctcccggttctctcctcgccacccccgccccgcgcctggcacggcgcccggcgcgccccagccgcccaatcccggctcgcagccctgacttcctgcccgccgggctccctcggcacgtgccccgcgccccatgggaccgcgcgccctcccggggcggcctccccgcggcctcccgcttgggggagccgggcttgggggagcgggtcgccccggctcggaggtggggtcggcgggggccgggcgggccggccgcggcggcgggaaggggacgctgcccctttaaggtgccaccgccgcgtggcagggaaacagcttgtgccagccccattccgcccggctccgttcgctacaagaaacacaatgcataacaatcaggcgcgcgcttggagccatgccacgcggcgggggcggggcggggccgcgcgccgggcggggcgggggctccggggtctcggcccccgacctgcgtcctgggcccgcaggggagtcctgccccatgctcccgggcggggccgccctgtgccccagcgaggtgccccggtgccccccgcctcgcccgcgcttgcccctccctccccgccatctcgctccctacaaagttcattcccactaactcttttccaggccacttccccctcacatctgacaatcggggcccctcattctcccagtaatcactccactgcactaattgcacatgcaaatatgcaaatgcgtattaattaattactatactaattagttctgtggtatttgcgagtaataaatcattggatgggagcgaggaagctggagacctggcccattttcattctgcataaaattttaatggtctctctggctgatccgggacggcagcgcgcggagaggctcttaaagggccagtggcggcgggaaggggcagcggtggggatcgccgttgaccccggcggggactggcaccctagaaggagttggagatgcggcctcacattctgcaggggccgtctccggcgtgcggtggcttctgcctccccctctggggctcagtgtcctccttagtggcttctaaggagagaacctgggcggggaccaggagctgaactaggattctttaagaaaggaaagaggtctaggagatgtgagaggccaatgccaaggctttggggccccaggtagcctgggagacaggaatgaagactccatctcctggatggctgagtaaactgaggcacaggacaggcaaatcttagctcccacccctcttctcccaaggggaaggaagctagaaggatgttctggttggccccagccttttcttatatctggtgggcgccacaaggttgggggtgcctccagctttccccttccacacgatcaaaccgctgccccgcccccatgggcaccagctggcaccctggcagagtagtcctgggcttgagtgggccctggggaccctgctttatttccaggaggtagtcaggacccgggcacagggagggggctggctgctttgcagggccattgactgggggaggcagacagaaccagttgtgctcatgccagggcgtaggaggatgccagaggtgggcaccttaaggaggtggggactgtgggcctgtcctgagccggtattccccgtgccagggtctctagtctggttctgctcagcctccaaccttctgccatcaacaagcccctggataaggcacagcctaaggagggtcagtgctctagtgggggccgatgataatgacagcaactaacaagactattaactcggcaaacatttatttagctggagaactgttcagcaagctctaggtgcctcacgaccccccagtgacacaagttctgttacagtctccgttttaaggatggagaaacaggggcacacgaaggttaagcaacctgctcaaggtcacccagctgtgagtagtggagtggagtttgaacccagacagtccagctgtgtgtgggttctttccagcacaccacctctccccaccaccatttctgcagctcctgctctgaaccacatcctttgctaagaacttcatgggcagtatcccatccaaaccttgcaacaacccagaaggtaggttctggaattatctccatgtggaacacaaggctcagagaggttgactaagctgctctggaacacacagggaagatgtagcaaggccaggctcacacctggcttgtgtgagggcagagtccaacagagtcctccaggccctctgatccctccccatctctgcccctgctgggatctctgcctcctggaagagcaagagggcgttgtggtagcccctgatgactagagaaatggaagggctttcagttagatggtagagagaacttgcttcttgaaaggtgggagctccaggggctggggtgggatggagccttttcttcctttcccagacaggccaaggaagggccttggctgtgtagtgggagatgggtggggatgggggtggaggggtgggggagaacagaagggcccagaatgataaagccttgtgaggaccacagaactcaggaatcctggctgggttttaaaaattttgtccctgataggccggacgcggtggctcccacctgtaatcccagcattttgggaggccaaggcgggcagatcacttgaggtcaggagttcgagaccagcctggccaacatggtgaaaccctgtgtctactaaaaatacaaaaattagccgggtgtggtggcgggcatctgtaatctcagctacttggaaggctgagtcaggagaattgcttgaacctgggaggcggaggttgcggtgagccaagatcactgccactgcactccagcttgggcgacaagagcaagactccatctcaaaaaaaaagaaaaaaaaatttgtccctgcattcctacctgccccccacccattgcccctggaaatgtcttgggcacccccacctcaagaattgctatttgggtttcctatttgggttttccaggagcttcggtctccagcagggggatgagaagataatactaagcaacactttgtaataaatcacttgtttttttaaactgtgtgcttatgagcatcaacttgcttagttttcataattctattgttatccccgttttataaatggagacaccgaggaaggaaagacaggttaaatgatgtggccaaggtcacacagctactaagtggtagaactgggacttgagcttctgagctggggtgcttcaccaccctgcacacgctgagccagattgacccccttgcccagcagtcagggatcatggtggcaggtggcctttcaccctgggtccctttggaacttgcagatgcaaggagaaagaacaggcctcaagcccgcagttcacatggcccctccccatgtgaattttcatggtgctgtttatatgctagcagaagctgggcaaagtgagtattcaggtggccctgatccctccacactggagcctcaggacgggtgggcactgggagctccagaacaggatgctatcccagcatctcttgccccctgccagcccacccttgagagcacagcagggtcagggagtcagtctattagcatctgtcagggggaccaccctgagacagaacactgggattcccatgatctcagggtccccttacctcctggtggctcagggggacttccccagggaatctggacaccctcatttccccaaaactagagaaacctttgacacccaccttctggacctgaaagtcgggtgggatatgggggttgtgggacttagggagggatggcccttgggctgcagcccattaggaaagaaaacccatccctgtctcagcactccactgaagaccagagaatcggggttcatcagggtccacacccctgcccccacccacctgccctgcaagatgcccagtttctgggtgaatgggagcaagttggagaggttgggggaagaaggcaggaagggcaggctggcggctctgagcttctccatgcagcccccggggccgggtgcctgggcaggaggacggggcagagcagctgctggcgatttattaagcagtcacggaaaaattggtttataaattaacagctgttttaactttagggcctcttcttcagggaatggaagcagccgactggaccgggattggagtgtgtgtaaggctggtggagggagtgggaggcggggggctccggcagctggcattcttcgggggcagcctcagctggcacctcggggggcaccaggcagtggccagagcagggggtctccaggtgccggggactgaggctacccctgctgtgggctgcagcttgctctcttctcaacttcccagctcccacctgggggcgccagagggcacatatactgctgtactcgtttgtgccaccagagggcagcctccgcacatcgatctctactgcttccgagaactgtccaaaccggcgggactgagagagagaaacctggtccagggcagagaaagagaggagcccactgcagtgcgtgcaagcgatcttccacgcgtccatcctgaatgtgttaaaagcagcagttaaagagggagggctctggagttggactgtttgcgtttgaacccagactctgggcaaaagctgctgaacctctctgaatctaatagcctcatctgtgaattggaaggatactagcgaggattaaatgagagtgcataggaagggcctagccccggtgcccagcacagaggctccatatgtgtcaccgttgtcaatttctgactcatgtattcatctattcattcacttctcaaaccatcctctcggcgtcatgcagtgcctgctgtattctgggtactgtggcaggtcggtgatgatgtaaacagagatggcggccagggacggtggctcaagcctgtaatcccaggcctttgggaggctgaggcggaaggatcacttgagcccaggagttcgagaccagcctgggcaacaaagtgagaccctgtctctacaaaaaacaataataaaaaaaacattagtcaggtgtggtggtgcacatctgtagttccagctacacagaaggctgaggcaggaggatcgtttgagcctaggaggtcgaggctgcagtgagccgtgatggcgccactgcactccagcctgggcaacagagcaagatcctgtctccaaaaaaaaaaaaaaaaaaaaaaaaaggtgagaaagacacgtatcaaaatagtgtgctaagagttacgatacacccaatgaggggagaagggagattgacttggatggggcaaaaacgaacgttctggggtgacagaaacattatatatctgtattgtggtggtcaaatgctatataaatttccaaaaactcattgaaatgtatatttaacactttattgtaggcaaactgtaactcaacaaagctgatttgaaaaaaagcacctaagcacccaatgtgaatttactgaatgggcaaagggatggacgatgggtgaatgaatgaatgagtgcatgtgtaaatgagtgtctcagatggttgtccacctgtcttggtgccaccactgctcctactgagggtgtccttgccctctcctctcgggtacacgggtttccccagagaggtgggtcttggaattcctcttcctcccgcgtccccccttctcccttcccccaagggcagggaaagacaccccagtgctcccagccagcactccccggctcctctaagggtgtttcctgggacttccggggcctcccttccagctgccacatgccaacccagccggctccggctcagctctgtggtgccaaggtcacgggtgtgatgcccaactccagacccacagtgcctgcagcagccacccaaaccctggccgactccgccacctgccggctctttctggaagcgcatcccgagagctctaagcgggaacctcggtcaagggctatcaggaaccctgccctggcgggggctttatttttcttcctattgaatagtcacagccaccatgtgaggtgggctctgaagcataaggaaactgaggcacagagagtagctaagaaatgtgtccaatttcacacagtaaattacagatctgaaattctacccagggctgggacttcccagttgatgttctgtccaggtaaacacatcttgcttgggaggagggagggacagatcccagtgtcccttctccccccatccggggaagagggcaaaggcctcacaccaccctcccagattttccctccaaaggtgaatgcagggcctcctgcacgccaggccccgcggcaggcatccagcaatggcgtgaagatacatgatgggaaagaaacgcctcaaaatagtgtgctcagacctatggtacattaatagacaccctaccgtcaactttttctgtcagtccaagcagagagacccacagttcaatcagagttacgtcaaatgaggtcttgaatttgttccttggacccaaccgcctgtgcttctaacccaagaataataaccaaggagtggcatattatttttacatcttatttgcatatgattaattctaagtcaaagtgaatgcagggcaccctggccccttgcttctcagtgccctcccacccccaccctgtgcctggtcctagccatctcccccagcccctgccggactccactgtccccagcagcccctccccactccttgcccctgcccacccctcctccagctctcaggagtcccattcccttcctcctctgtcgcccacacagcccccaccacctggccgcccacctgaaaaacttttccccaagttcttgagaagtcgcgtaggatccaggagagaaaaatcaaagtaataaaacctcatttaattcctaacggagggcagagctgcgagctgcaattatcttaatgctgagctatttttactctctctccatctctgtcttctgcctttctctgttgtgaggttcgctgtctctctctctgcctccctttgtctctccatctctcaaccatgttttctgtctctctttgctttctcctctctccccccaatctctctctcacgtcctgtctctgtgcagtctcttcctcctccttcatgtctgtccctctgtcagccagtcttccccacccttcttggccccaggatttagatgccagcctggccacaggctgggggagatgggcaaaaaccctccctccgctcccaaagacctcatcttccaggcctagctgagagggaggcttctctgccctcatctcccttctcagctgccccagcctgggatccggggaatgtttcctgatctggggtctcccagagctccaataagttcagcagagcctccgtaaataagccctcctgctcaaatggggctcagctgccatgttccctgaggccttttcagctcctatgggctctgaggtgcaactggtgctgatgcctccctgtctccaccctctcatcaccctcccagctatcctctgtccccttcatccccacgatccttccccacactgccagcactggaagccacaagccccttccccacctctgcccacccagtggctgtccgggccactgcctgggccatgcccttcccataccccttcttcctttcaggacctccttatttaccctccgaaggcactgccaaacaggtctttgccactccccaccacaccccatcttcgacagaggttctgggccaagcctaggggctgccagagatgcctacacccctgggccaacaacttatcatccagctgtttcccaacaagtatataagtcaacaaacatacagggacttgagccaggcctggggtgggctgatgtggagctggatggccaggacatcccactcctatgagcaacactctggacctcctgccaccctttccctcacccccagagtgggccctgaccccaattccagaagattcctctggcctttcactccacccaggacccagatgctggggctgggagtggaaaagctgcaggaggattgggggtttcaggcctgagagtgaccaggagagaggacgccaacacaaacagagccccaggaaaacatgcatgtacacgtctacacacaccctctcagtgctagacagaagcattcagaccctctgcacagctccaaggagggaaacagcagctcctgcaaaggcacccaaggcccggacaaatagaccaaatagacagggacattccacccacagggccagctcctcccgctcccgctccagagacacacacaaatacctctggagagagagaggctcacacctgtctcccccaaccctgcttctgaatgcaccaaattcatgcacgtgatggcacgtgtacaggcagcccccaaacccaccccaactctgggccggccctgtcctccccaccccattagatccggagaggaaagacaggagccacgtgaatctacagtacatcatggcagggcacattccccttctccctcacaggagcgctcacacatccacaacctcataccccagcaactgcacagcggagctgtggatacagtcccccaccccctgcaagctggcacacgcctgcccatcaccttgacagcctctgacatcctcccccacacccacaccctcccccgcacacacgcagtcctcccacaccctgccactcacacctgcatctttgacactctgacacacttacacagacacactcacaccacaccggaccccccaaaacacactccctggctatgggcaccacagggccccggcacacccctgcacactctccctgccacgatgactgacacgtgtcctcccacacacaactcggtcacactcgctccctttccaggacacccccattcacagcgtgacaggctggtactctccccacgacctcgcaggcctctctgaaactcccagtaccaggaccacgaaggggttaaagccagagtcctgcctccccgctgcccctctccccctccctccccctttatcctctctgctggactccatcaataatgcagcttcaagttctggggagaccgcagggggccccccagctggctccccaggccttggctctaactcccaccctcctcccagccccaggagaacacgattctccatgctcattggccagtttcccctaaaccctccctccgagcacccgggcgccagtcccaggcggaggggacgggctggggaccccaaagctgggaccggagggtgagcccggcagaggcagagacacacgcggagaggaggagaggctgagggagggaggtggagaaggacgggagaggcagagagaggagacacgcagagacactcaggaggggagagacaccgagacgcagagacactcaggaggggagagacaccgagacgcagagacacccaggccggggagcgcgagggagcgaggcacagacctggctcagcgagcgcggggggcgagccccgagtcccgagagcctgggggcgcgcccagcccgggcgccgaccctcctcccgctcccgcgccctcccctcggcgggcacggtatttttatccgtgcgcgaacagccctcctcctcctctcgccgcacagcccgccgcctgcgcgggggagcccagcacagaccgccgccgggaccccgagtcgcgcaccccagccccaccgcccaccccgcgcgccatggaccccaaggaccgcaagaagatccagttctcggtgcccgcgccccctagccagctcgacccccgccaggtggagatggtaaggggcccgtgccccaccccggcagcgtacccgacacaccccgcggggcttcttcgccctcccaaggcgctgccccggccggactggcctgggggtgggggcgcaaggagagccgggctctgcctcggtcaggacggggcgcggggccgcgtgtgaagttagctggagactcgtgcaacttttccccgcggctttggtcctgatcccggggcaagagagttcctggcagtgaggctgggggtgcgggggtggggggacaggccgattccagaccgcccaggagtggggtgggggcgtcctttggtcccagcacagtccccaaagggtagtcagtctcctaggctaccaccgggaccgctccgcctggctctgtcccagagctggtcagatgtgagcagcggtggacactgaccttgtcacccagggcaggagtatgaggctgccaccgggtgaatccactaccctgcccctctctaatcccgcgtgtgtgcctgggctggggtctccagaacctggctctggcctcctgctgtcaggccccagagccccaaccccaaggagggagaggtggggagtcatcacaaagccagacctcttcccacagactactgagtcctcctgagggccttcttgggggttgaggggcttccaaaggctggcgggtgctgtgacagagagctccacttcccatccctagtggagcaggggtcacttgttgctgagctgagatgcagctggctccccactgagcagtgatgagggggccaagtcattatggggggagatagagggcagggggtacagtcctgggcctaagcagctttgggtcatgagggtgtcatggggagcttggctggggaggtggcagtttcagcttaactcacctggttctctttgtgcatttccctggagctcaacagggacctaattaactgacagttggtctgattgccaagctgaggggcggggcggggaggggggcggtcagttgctgcttggctcacgtagcaaggagggcaacttttcatttctcacaaggactgggtgaagagttctgcagccttacagagactggaaaagaagcccaaaccaaggcccccagagaggtcccccaggcccctttgggtccctgagcctcagctggaggtggggggtgcctgcagtgcgctggctcagtctccttctgaaaagctggatccagcttgtttgaagcccttgagctgatcttaggtgggcagggccacatgggtgccatggcccgtggggcatcttccccagagggcccagccgtggcagctggagctgtagccagctttggcttccgaggtctgatgttttcagaaactggagagaggaagggccttggtgggagaagataggaagggagatgtctgttctggagtagccatggagtgggacaggcatgggctgggagtcagtgactggggtttttctcgtcctttggacttgttgtgctgtgtggccttaagcacattgccaaatctctctgagccctgctttttcacctctgtaaaatgagggggttaggtgagctacagagttccttttggctctgacagactttgattcaaaggttccctggggactccaaagcactgtttgttccctgctgcctgggggtgggggagggctgcaggtgtccatccagtcacccctccctccatctccttagatccggcgcaggagaccaacgcctgccatgctgttccggctctcagagcactcctcaccaggtaggcccctccctgcccacttagccctggccccaccctagctctgatgccttcctaggggccctgccaaagtcccatgaacaggagtcaaagctggagactggggagtggataaggtctgggaacccaactctattggctttatttattgacatgacacctcccagccgcaggagggagagggcacactttccctgtccccagagattgagaccctggggaaaataactcggattctttctctctctccctcttctcttttcctcctcgcttggttctggttcggttggctttggtggccttcctcagaggaggaagcctccccccaccaggtgagtttcctggggcagctggaaggagggatgcctgggccccttggggtggggtggacgggtgcctgcagtgacaaccaaccagtatggggtgccacccaagaggacacattagcatatcaatgggcagtcctctgagagtgcctcatgccagggtgccaccagcagatcctcctctgctcagactcagggtggaacctcctggacctagagtcctgccctgaaccaggccatggcttatggggggccccccctaaagccacagggtggggaggctcagcctaggtgcaggacccattagcagtggctaaatcagtctgcttgggtggccatgggtgggatggaatggagggatggtgaaggcaagggcctctgctgagcccctttaacctggcacttcccctggcagagagcctcaggagaggggcaccatctcaagtcgaagagacccaacccctgtgcctacacaccaccttcgctgaaaggtactatacccccaccgaccttcctggctgtccgcctgatccctggaactgggcagacgctaggggagcttttgtcagtggggagggattgtttcgccacacatagcccgctgtcagcgtggcgcaacaacccaacgtaaagaccaattttttctcagtctggccttgcaaaacacaggagtcccgaggctgcaatgggcagctatgggccttaacatcgggttgtgggcttgaaagaaaagagatggctggcctaagacaaccagcaggcatccgcgtggaagggactccacctgcagctcctcttcaccagcctgtggtggaccacctcccacccctgctcatccagggcgccttctcctgtgggcttcacccctggcctcccctcccatttgcatcccatttgcacagatctgcacactggtctcctctttcctgcttccctttctccatggaaaagcaagccattccttttgcacacttactcaacacctagtatatgccaggccaagttggtgggcattgggcagaataagatgagtcagatttggtccctgcccccttggggctctttgcctcaaagggtcagggaggggccaagtaaggtggctcacacctgaaatcccagcactttgggaggccaaggcgggaggactgcttgagcctaggagttcgagaccagcttgggcaatacagtgagacccccatctctatgaaaaatttacaaagtgagctaagcgggccgggcgcagtgactcacgcctgtaatcccagcactttgggaggccgaggcgggcagatcacctgaggtcaggagtttgagaccagcctgaccaacatggagaaatcctgtctctattaaaaatacaaaattagccaggcgtggtagcgcatgcctgtcatctcagctactcaggaggctgaggcaggagaatcacttgaacccgggaggcagaggttgtggtgagctgagatcgcaccattgcactccagtctgggcaaaaagagcaaaactctgtctcaagaaaaaaaaaaaagtgagctaagcatagaggtgcacacctatagtcccagatacttgggaggctaaggcacaaggattgcttgagcccagaagtttgaggctgcagtgagctatgatcgcaccactgtgctccagtctgggctacagagtgagagcctgtctcgggaaaaaataaaaaaagaaaagggtcaaggaaggtacacaaagatgtttaagcttggatttgaaggatcataggaatttaacaggcaggcaagggcatcccaggtccaagaagagggaagaaggtgtgcaaagagaaagagatgcgagtcagagggggacttctgggccaacctggaggaggcttcgtttctagtcagggagctggggagatatacctgaaggacataggagggcctcttcctgactaagccctgttgcctaccaaccccccacctcaactcctgcctggggctcttcctgcccggccagccccctccgctcctgcggaggttgggagggagagctaccggaagagtatgctgggaagtggttcgggggagggtttaataagttcccagcaccagccaaggtcaacaggtatacctgtcagcccacttgccagggttgggaacagagaggagaggctgggaagggaggagagaagggaaggggttattttgctttccccaggacaggaaaatgaagggtcagagctgcagcaagtgggcagtgtggctcagcacctggaaggacctccccacctagaggggtgtgtggaagggccccaaagcaggcatgagggacagagtgtcatcttctcaggagagaatttaagaaatccctctccctcccaccttgggctgggtagggagaggctgggtggatgtgaggggaagacctggctcttgactgcaagcatgggcgaacaggccaggatgaagatgttagggccagggtgctaccatgcaccgtgcagtggtcaaaattgtgcaccccctcaactgcccctttaggccacatcttaggagagtccaggtgagtagaggcagggaagaggaaagggatcaggagaggggtggccagtctggggcaaggctggggaccttccaactgaagaaggaagacttgtggtggggggagtttggggccccacagagtggggcagagaaggagacagcctggaaggagtgatggggagaccccagagagcccaggaggcatgagggaggtgggggaagcgagggaggctcacggggcaccagcgcaagcaccgcacacaccttctgttgtcactgtggctcacgaagtgaactctcctcccccgctgggggagaaggaagctgcctgggctgccacctgctctcctgccttacctccccccacagccctcatggatccttctctaccaggagggcactgttttgtaggcttcagtccttttgtgggcaagggaaggtgcccggcagggttggggcttgtcagggaagaatcgagggccctagagagaggggcacagcactaagtcttagcttgaggggttgtgctccaaggctggagctctcacacttggctcaagatgaagctctgccgcgtccccaaggtcagggtagggtgatttattgtgcttttattgcctggatagcttgcccagagccagcaggaggtactgggctgggagctgggggctgggtggggcagcgggcacatacaaagcaccctctgtgcctgtccccgagttggcaggagcatagcaccctgctcactgtgccggaggtttccagcctggccctacccctctgggccttctgaggggaggggccactggcagaccaagaaggaactgcagcaactccccattccccacccccagcccctcctcagcatcttgtctgtggcctgtgaactttgtgtcgcatatgttctaagatcctgccagctcctgcagcctctcctcagtggcccctcaacctctgccatcccccagaacccctggccttggcccctttctctaaccccttgctcctttccatcttttggaaacttgtctccagctgcccacactgttcccttcccagccctatctgagcaggtctttggaggctgggggggttgctttctaggtcaccgcagagggagctgggaacctggggatgtgggtcaagattgtgggggccgcatctgagcatgccgcatcccccggcacagactgcactggctgcagactattatgtcctcagcctcggaattgttctgtcccttggagcccggggcaggagtatgtggattggcatctatgactgggcagtgccagggagtggggactatgcatcgcatgggaggtaggatcagggtaagcagtgagccctcagcaggctgggcacccccaagaaatggaaagtggcaaatccccaggccctggttcctacgccctgtgccttctgcctgggcttgaagctgggagacactgtctcccgtactgggtacttggaaaatcaagctctccagccagggaatgttaagctgctgctgtgcccgcctggtcttgcccagcctagtgccctatggtgtgggggagctgcctgggggctagcatcttaggacagcttaagagccaaacatgatcaaatctacccctggctgcctctgccctggtctgacacccatcaggctgacctgtcaactttggcctttgaacttgggcccctgagggggtattctctgccccaggcctacgggaaggaggctgggggctaggccacaggctatctccagatccatgggctgtgtctagctgacccttgctttcctcggtctcctctgtgccagctgtgcagcgcattgctgagtctcacctgcagtctatcagcaatttgaatgagaaccaggcctcagaggaggaggatgagctgggggagcttcgggagctgggttatccaagagaggaagatgaggaggaagaggaggatgatgaagaagaggaagaagaagaggacagccaggctgaagtcctgaaggtcatcaggcagtctggtaagctgaggggcctgtgacatgtggattagctgtgggtcctccttgagtatacgaggacgtccccttctagttcagtgtctcatacacgcaaactgtagtgacaccacaggggcctccctgtcttctcgctccatggggtgccccgaactcagccctacctgagacatgggtttcctccatccttggctcagtccctctcccaatcaggttttccctaataattcctctcttccctgagaattaaggccaaggccgtttggggtttgaggctagagccaaaagaggacttcccacctatggcagtaagggggcgtgaggacattcagggatggaggaccaggagagtccaacacccctgtcacctgcatttcacctacatttttgaacctaggatgtggtctctgctggggtgcagagggctgcctcatttacttgccctctccaggactgttgtctgtttctcctctttttccttcctaggatggagtgggagggtgccctctagtgtttagatgtagaatttaaaattcaagaaccagcccggcccattaacctttttagtctcattatttatgggaatactgaagagtcaaccacccctactagaagctgtcagctcttccacacaaacaaaaggccttgggcctcctgcctgcatatctggcagtgaagagattggccatgggggcaaaagctgttgctgggcttcagtccctttgtgggcaagagacagctggaagacctgaatcagtcctcactgagacccctccaaaacagtggaagaggggtgagaggagactgttccctcaggaaaagcagcaggtggctgggtgcggtggctcatgcctgtaattccagcactttgggatgccaaggctagcggatcacttgaggtctggagttcaagaccagtccagccaacatggtgaaaccccatctgtaataaaaatacaaaaattagccaggcacagtggcacacacctgtaatcccagctgcttgggaggctgaggcagaagaatcccctgaacctgggaggtggaagttgcagtgagctgagatcgcaccactgcactccagcctgggcaacagagtgagactccatctcaaaaacaaaaacaaaaaaccaaaacaaaacaacaaaaaaaaacaaacaaacaaaaaatgcagaagggcaccgggtcaaatgatagtcctatgatggagcaatataaaccaccacgactcctagtggctcctgggtgctggcgctgggctgggcagggtattcactattacatcttgtttaaggtaatctacacaatttccccctttctatttccttcagaaaggtactaactgacttacgtaagccatatggctagttgctgggagagctgttctagcccagttctctctccatgcttccatgatgcccctggaaagcttaacctcagccatcagacacttagctcacactccaggacagccggatggatacgcagagcctgtgttcttatctcttctttcccatccccagctgggcaaaagacaacctgtggccagggtctggaagggccctgggagcgcccaccccctctggatgagtccgagagagatggaggctctgaggaccaagtggaagacccagcactaagtggtaaggcttgggagtgtgaaatggggaggaggggctgggatcttggtgggtggggccaggccctgagtccctctctgcttgcctttcagagcctggggaggaacctcagcgcccttccccctctgagcctggcacataggcacccagcctgcatctcccaggaggaagtggaggggacatcgctgttccccagaaacccactctatcctcaccctgttttgtgctcttcccctcgcctgctagggctgcggcttctgacttctagaagactaaggctggtctgtgtttgcttgtttgcccacctttggctgatacccagagaacctgggcacttgctgcctgatgcccacccctgccagtcattcctccattcacccagcgggaggtgggatgtgagacagcccacattggaaaatccagaaaaccgggaacagggatttgcccttcacaattctactccccagatcctctcccctggacacaggagacccacagggcaggaccctaagatctggggaaaggaggtcctgagaaccttgaggtacccttagatccttttctacccactttcctatggaggattccaagtcaccacttctctcaccggcttctaccagggtccaggactaaggcgtttttctccatagcctcaacattttgggaatcttcccttaatcacccttgctcctcctgggtgcctggaagatggactggcagagacctctttgttgcgttttgtgctttgatgccaggaatgccgcctagtttatgtccccggtggggcacacagcggggggcgccaggttttccttgtcccccagctgctctgcccctttccccttcttccctgactccaggcctgaacccctcccgtgctgtaataaatctttgtaaataactgctgagactcctctttcaggggaagcaggaggaaaagggaggtaatggggcgtcctgatagggaaggccggtggtcaaccaagggttagggttttgaccctactgtccaatcctctagtctaggagtctttctggcagacagcaggctcggggcactcagaggaagaactacagaagttctagctgctgcttgggatggctgaaggaggcaggtggggtggggaagtccttctcgaataactggattcctccaaagatttccccatccccacaggactcccctcgggaaattcccctttttccctcagtgccaggcctgtgtggcctaataacgacggccctggtcttcttcccactcccctacccttaggtaggcccttagactccggcctttgagtccgcttctgcgcagggccggggctggaggcggggcgaaggggcggggccgcaggcgaacgcaagtcccgcttcgctctcgggggcggactcagcggcggaagtggcgctgccggaagatcttcttccgctctgaggcgctactgaggccgcggagccggactgcggttggggcgggaagagccggggccgtggctgacatggagcaggtgggtcccggagcggtcgctgggagcgggtggcgtgcgagggccgtcttccgccggtcgaacccgcttcgccgcccgctgtccgtgctgggttccgtccgacccttcccacacccgctgcgtctcaggttccgcccccttcctctgtctggcctcgcgccgccccgcgcgggttggggtctccagcaatgactcttggcgaccccgcctatcctggggagcccggggaggacgttcgggatctccttccaaagcctccgtcttaactgaggggagaggagagggtgaggtgtctgggtgttatgagcaggggcaggtatggggaggggtcggaatctggggtgagaggaaaacatctacgcattccggtagctctgcgtctcagtgtcatcccgtgtctccccaacttcctttcgaaacggccgtgaataacttcctaattggtattaaaagggccctttgaagtcttgagttcttagaggtgcatagtaccattgacactcatttctaatgacacgttccctcaccccgcatttttgggttagtcaatgtctcctggttttcttcgtaccgctctgacagtcggtcaaagtcccgcttcacgttttcctctgtcgcccaacccctcgctctgtacactgaatctcagtggtcttattttcccccacggcttcagctttacaccaactaaatacccagatccacatcttcagcgcagcccttccctggagctccacgcttgcccatccagcggccattgggacagctctgcttcacatggagctcactgggtccaaacttgaactggtcttttccttgcagattaattcttcctctaccccaacccagccggaagtctggtaatttccttacactttctcctctctttcaagtcccacatcttaaaagtgacctagtactgccaacttcctgaacatccttcaaacctgggccagctccatctcttctgttaccacgctgttgatgtattgtcaattcccaacagtccagccctggcagcttgcaacccagtctccaaactgtaactcttgtgatccttttagaacacaagtcttacggtgccagttccttgctgataacctttttctggctttctattgcctatgtgctgaacccctagcacaatttacacagctctctgtgatctgacctagcagtctcctgtgtgcaccctaaggtccaataatacggcactgcagcatgcgccatgcctacccttgctgttcgtatcttcatgactttgcacacaccagcccccgctgcttggaaacctcctccttctcttgtctgctgggctaccttctacatgtttttcagcgcaggcagcgctgcctccgcctaacccccaaggttaattgcccttctgtgtcctgtagcaccctgtccataatagcatagtagctgagaatacagactcctggatcagactgcctgggttctgacctgtttggtaaccttgatgaagtcagtgcctcaatttcctcacttgtaaaatggaggtaggaatgtctctacttcatagagttgtgaggattgaatggaatattgtatgtttaggtcttaaaccagtgctaggcacaagaatgctcaataaattaaagtgagttgcctgggtgcagtggctcatgcattaatcctagtactttgggaggcaaggcaggatgatcgcttgaggccaggggtttgcaactagcttgggcaacatagtgagaccccatcgctacaaaaatttaaaaaactagctgagcatggtggtacgtgtgggaggatcctttgagcccaggaatttgaagttacaacgagatatggttgtgccactgcactctagtgtgagggacagagtgagatcctgtttctaaaataaataaataaaaagttattactattatgtaaggacaacatagttcaccagttatgatttttaatttcataagttgcctgaggatggttgaagtggcttactagtcattggatagagcctggctctttgccaataaataaaatgctggagtggaggacactgggggcagggtctggatttattgagtgaagattcaagagtgaaaaaggctcagacctggtctgctcaggaaaaccagtctggaagtgtgtgtgtgttacatggcaagcattaaatctagagaaatgtatagatctgggaactagagggagaaaaagaccaggggcggcttctgaggagctgacagttaatggggcctataaagcgatgggaggattttatcagagggaggcagaggctggagtgggctcagagatcagaaagctgggtcctctgaacagagctccagtagatggtggctgggtgggggaacaggggagacggagctgaggaagacagaggcagcgtcctttgctgacgctggcaattcctttcctgtattggccatgaggaagcatcccttgacttgggagccagcagggaccatgcctgggggcaactatgctccggaggcctagtacctggtgtttgggaccaggccccctgggtagggccattgtgcatgcctttgggctgggccttctttggagctcttttgcctccctgtaatgcccaccctccttgcctccagctgatagatgctgactcttcaaggccagggtcagatggcccctcctccctgtggcttttctgacttcactcattccagcctgggtcagatgatcccttctctgggagcccacggtcctttgttcattcctccctgaaagcgctgatcacagcatggtattatttatctgccagtcttcctcaccagacccagagtccctgatggaccagaacagggtcctgtggccccaggacttgcactgtgtccagcatactgtaggcccttggaacccgcatgttgcattaagttgagctctcacacagctagacttgttaagggagagcggtgcgggggagataaaaaatccggcacatctggcagcttgtgcctgttccactgaatgcgagagcctgttggctccactttacagatgaggaagctgaggttcaggggaggtaaggtcaagatcactcagcagggatttaaagagctgtctcctgactccaggtctgcatgtctcccagaaactgccttggggtcccagcctccaagggggcaggtgccacatcagtgggacaaaagaaaagtgtccctttttctggctgaggagaggctaatcctggctttgtccaggcagggttggtgcctggaggatcctgtgctgaaaccggctcccttccatccccccaacccccccaccccttgtcccttgccctatgggggccttttcttgagagggctgagatctctcctggaagatgactagccgtttccagactaaccttgggaacttgacctcactggtttacatagcagcacgaagagggcaggtggggcctgattcactggccctgagtgggtcaggggtcatggaatcacagaactgggggcatccctgatgattcacagggcctggcacaagggggaagggagggcaagtagatctcagtgtgttagggtcttcctgtacactgcacccgcagagcctccccggctggggggagaagtgtgtggtggtgagtcttgtttctatttggcttaactcttccccttccgcttcctcagaaggaaaggagaaacagagccaggctttggctttgggtcttatttgtcactgtagctgtgtcctcctctccctacactcccacttctccaggggatttcccaaaccctctgtggagggctatagtagggccagtcagccaaccatcccgaggctgatggcatgggccagtaaccctgaatgtgccatcctagccaggcgcagtggtgcacacctgtaggctcaactacttgggaacctactcccaagtttttgactccaggattgatgtccaaccccaaacccacaccctttctcctgttccagggtggacattacggatccacagactagctaacttactagacatgtaccgtggccaggcactgtggctgtgacttggacctcaagggcttaggacagatggccttgaaacatctagctgtgataagggaaatgctgacccagagttacttgggaggctgaggcaggattgcttgagcccaggagtttgagaccacagtgtcctatgatcgcgcctgtgaacagccactgcactccagtctggcaacatagtgagacctgtctcttaaaaaaaaaaaaagtgtcattctgggtcagccccctgaagccagggtctacccttccattctgcagtactgctgggactctcagtttgggcaaagtgctatgctggacctgcctggccagggtcctgcctctaacactgtccccatgggtaatagtagtaatagctgctattaattaagcacagacactgtgcatgtgttgtttctaatcccttcaagctctgtgaagtaggtactatattctccccattttacagaaaaggagactgaagttcagagaaacccagtgatttggtcaagggcacacaatctaataaggaatggccttaggtttttgcctccaggactggtgtccaaccccaaacccacacccttttccctgttccagggtggacattatggatccacaggctaacttactagacatgtatcatggccaggcactgtgactgtgacttggacctcaagggcttgggacagatggcctcgagacatctagctgtgataagggaagtgctgacccagagttctgaaaggtcaggggagtctggagggtgaggagaagctctgccccggaggtgacatttgaactagtctctgaagcgccagagttctccccaaaggaaggaggtcattcaagaatgaggaaacagggcgcccaggcgatgggctgtggtgtgtcctgggagcagccaatgatcagcagagtagaggcagcgagtgttgacccccatagcaaaaaatgagtgctggggtctggagtcctccctcctccttaaccctcctctgttatcaaagactcaaggttaactcaccttacgtcttctccctacaagtcaggctcagggaggggagcagataccctgcttgaggacccccaggaaaccagttcctctttccttcttgtggagggagtgcctgggctctgggcagggaagacccccacagagggtggagtccagctccaggagaggcagcctgggcagggaggggctgctctcccggctgggcgtgagtgtccatgtgcacttgtgcatgtgctgctgtagggaagggtgtaaatggccgttcagtgcatttcctggaaacccactctgagcctggtacagttctggcactgggcatgcagcagggagcaaagcacaggaagtccttactttcatggagttcgcatgccagtgggagacgatgggcagtaaacacagaccagtgaatgtatcatatgtcaggggtgacaagtgctgtgaagaaaaatacagcagggtaagggatggagggtgggggctaaatagaggttcaggaatggtctctacaaagggacatttgcatagggacctcattggaatgagagagcaagtcatgcaaagacctggggaggagctcccgacagagcagcaggtgcaagggccctggggtaggagcatgcttgatgtgtccgtggacagcgagggaccagtgtggctggagtagagggctcaaggggaagaggaaaggggaagaggaggacttgtaggctagggtggggacttacgcctttattctggggaagccattggaggttggggcactggggagatgtgatctggcttttaacaggatccctgtggctgctgtgttgagaacaggctgaaggggtgaagacaagaaagagtggcaggtagaggtgatagcctggacagggtgacatagtggtaggtgagcagtgggcagatactggccagattttgcaggaagagacaacaggatttgctcatggtttggatgtggaagggaggtgtgaccagatgaatgctaagcccaaagagggcctcttgacacactgtcccccagctagcaaggactcttgcaggcagcagcatttgtacttagaaggtcccagcctgtcatgggggaaggtcatgttcctctggggtcggctccgctctgcctcttcctggctaggggactgtgggcagctctccttcccatgagtcatcactacagcttctgggaaggggtgtgatgcattaaggagatggtgtctgcatggtgccaccgcaggccatggccagctggatctgtgtcttctgcaccagcccatctggatgcagtgcaacctgtctggtctgctatcctgcgttcccctaactggcaccctcctgggccagccagcagcaggacatagaccaaggccaacctcctccacacccagggcctctgccttctaccctctgtggagtctccattaacttggcattgacagggctgcttgactcaaaacaaccccagccctgccctgaagccatctcgccagtcagtcagagctcaagactctctctttctctggagaagagcaggaaagtaatcccagctaaccctcatgcagccaccactctgtgtcagaatctcttctaggccattgcattgaataagtcatttaatccatataaacctgcaaggagtaggtgatattgttaaccccattttataggcgaggaaactgaggcatggtgaggttaagtgaccagcaaggtggaaatctgaggtttgacccatctcctggtgtggagtccagttctctcagcttcactgatccttcctgatttgtgctgagttagggaccccttgggaagcccccatgggcagggggtgctggtgctagcatttcctgtggattatgggagggggatgtgtggaggacctgtgtctactgttcctctagcctctgggggatttggagaacccactctgcccagagatgtaagtcatctttggatatagatgagacttgttccccctccccctgaatcccagggcacagctctatggaataagctctagctggaacttgtaaagtttggcccagccctccctgggaggctaggaggtggggaagagccaggagactcgaagtggtggtggtagttaatgtctatgtggttagacgttaaccagttactctgtggtgccaggcactgtcctaggcacgctatagttatcattgtctcctttggtgcccccagacagcccagggtcaagacaggtagcctcagtttacagatgcagcagtggaggcttgcacaatgagtaggtggctttgttcaaatcacagacctaggccaggtataaaagcctaagtgtggtgtaattccagcactttgggaggccaaggcggggagattgcttgagtccaggagtttgacaccagcctgggcaacatagtgagaccctgtctctacaaaaaaaaaaaaaaaagaagaagaaaagaaaagaaaaattagcctggcatggtggcatctgcctgtagtcccagctactcaggaggctgaggcaggaagatcacttgagccagggaatgtttgaggctgcaatgagctgtaatcacaccactgcactccagcatgggcgacagagtctcaaaaaaaaaaaaaaaaatcgcagacttgccttggctaggaaacgcctactgagagctgccgtcggtcagctgggctttggagccgcctccctgaagaaaggtgtctggagcttctggcctggggtatgacgaagggctagcaaggaaccctgtctgtggctctgcagcctgagatttgtggaaattgaaaattggaggtgggtgagtgggaggcggcttagccatcctgctgtcctcctcttctgtctgcgggaaggggcagccgatgctgttccctgggtgggagcttgcaattgcagaggggccggtctcaagaggaaggagtagagatcagcccctgcactcccctaagagcctctgccaggagccaggacagtcctctacttcctgcccctcccccaacctggaattcacctctgcctgcagctggataacctggcctttctatagatgaaggaaccaggctagagggttagggagcttgctctgagccacacagcaggtgaattgtagagttcagatttgaacccacgccttttggggtgatttttattacatgtcactatagtgtatttaacctccctcgctcacaatttccctcttacttgaaaggtttttgttttgttttgtttttttgagacagagtctcactgtgtcacccgggcgggggtgcaatggtgtgatctcggctcactgcaacctccgcttcccgggttcaaatgattctcctgcctcatactcccaagtagctgcgattacaggcacacgccaccatgcctggctaatttttttgtatgtttagtagagacgaggtttcagcatgttggccaggctggcctcaaactcctgacctcaagggatcctcccacctcagcctcccaaagggctgagccactgctcctagccccatcttacccgaaaagtcttgccagctacttaatctatctcaaccaccactgaccaagcggttaccatactccctcctgacacctacctcaacacccatccctgtgacatagggattcttgccttttttttttttttttttttttttttttgagatggagtctcactctgtcacccagactggaatgcagtggcgggatcttggctcactgcaaccttcgcccctcaggttcaatcaatcctcccacctcagcctcccaagtagttgggactacaggtgcacaccaccacacccggctattttttgtaattttagtagagacagggttttgccatgttggccaggctggtctcaaactcctgacctcaggtgatcacctgcctcagcctcccaaagtgctgagattataggtgtgagccaccgtgtctggcttcttgccttttcttgtcatggtaaaatatacataacataaaacttaccattttaaccttttgtttgttgttttttgttttgagacagggtttctctctgtcacccaggcttgagtgcagtggcacagtctcagcccactgcaacctccacctccccggctcaagtgatccttcctcctcaggctcctgagtagctgggactgcaggtgtgtgttaccacgcctggcaaatttttgtattttttgtagagacggggctttgttgtgttgcccagactgttcttgaactcctgagctcaagcagtccttcctccttggcctcccaaagtgctgggattacaggcctgagctaccacacccagcctattgttgcctgttttaatgcagctgaggaaactgagtctcagaagggttatgctttgccccagagcacacagctaggaaggggacagtctgagatttgaaccatgaccttagagtccattcctttttccatgataccagccacctcctgtttgtcctgagtccaggacaccacccaaaaccctattacaagtggggctggtactattgtatcctagggtgaggaagagaaggcctggaaagcggtgtgggggcgtgtgcccaccccttccctttgcctcatgaataatccgctgttccctggcacctgacttcccccctccccacccgcttccccctctaacccaggatggtaaaacctccacttttgcccggcgtggtggctcacgcctataatcccagcactttgggaggccgaggtgggcggatcacaaggtcaagagatcgagaccatcctggccaacatggtgaaaccccatctctactaaaaatacataaataggcaggcgtggtggcgggcacctgtagtcccctctacttgggaggctgaggcaggagaatcgcttgcacctgggaggcggaggttgcagtgagccgagatcgtgccactgcactccagcctggtgacagagcgagactctgtctcaaaaaagttaaaaaaaaaaaaaccctccactttcccccctacctcccactctcactccctccccaagcagttcagcttctgcagacactcgactgtcaagtctgcagccatcccaggcagactctttcacaccacacgtgctgttcccctcctgacacttctgaaggtgcttgggagaggccagtcacagcaaccagtgggctcttttggcagtgggtggggtgctgctcccagggggctgggctgtctctgaattgtccattcctgcctccccctcatcaggagggtgggtgtggtgggtggaggcctgcgctagctgtgatgcctccagggctaggcagcctacagtcagccagagaatgagcactttggggactgcacagggcagttccacgccacggtgggttttcatcacttagactggcaggtggtctgatggagctcaaaggcctttcaaagtcatctgagtgagccccattttcaaaccctagccaacgaggcctcactcagggtgatgctggagtttgaggaaaggctgacaggtgggattcagtagctgcttttacccatagcagtctggtttttatctgttttatatattgaggttccaagtaaggtattactcttttaaatgtttctcttgctttgcaaaggaggtggtttgtagctgggtgtggtggctcatgcctgtaatcccagtactttgggaggctgaagtgggaggatcgcttaagcccaggagttcaagaccagcctgggcaacatagaccttgtctctacaaaaaatttaaaaattagctgagcatggccggccgcggtggctcacacctgtaatcccagcactttgggaggctgaggcgggcggatcacgagatcaggagattgagaccatcctagctaatacggtgaaaccccatctccactaaaaatacaaaaaattagccaggcgtggtggtgggcgcctgtagtcccagctactcgggaggctgaggcaggagagaatcgcttgaacccaggaggcggagcttgcagtgagcctagatcgcgccactgcactccagcctgggcgacagagtgagactccgtctcaaaaaattaataaaaaataaaaaaataaaaattagctgagcataatggcatgtgcctgtggtcccagttactcgggaggctgaggcaggaggatcacttgagcccaggaggtcaaagctacagtgagccatgttcacgcctctggactccagcctggatgacagagtgagatcctctctttaaaaaaaggcagagggagatgattgaaaaaaaccactgactttcccccagataaacagaggcttggtgagaaggacttgcccagagttaggcggaattactggttgcccggagactggggtacaggttccttaactctgggccagtgctctgcctactgtacaggctgtcatttggactttgagctgctttcggtgggagggtgatatcaaaccccctttctttgactcttggccaactgtccccgcccctgccttcgagcccccatgcttggctcccacactccctggcatatttcaactctcccgggctcccgcaacacctctgctctagccccatctgcgtctctcgcttcgacagggacgtctgggcatgtgagtgtcagtgtggttgccactccaagtgcgtctcacacccaagctgctgccatccaagtcctgtccccaaggagagagaaagtcagagggaaagacagacagacacagaagtagactggagtaggcgagcgacagcacctggaagtgaggcaaggaccaaggagggagggagggaggagagaggcagatagagaagagagagagaaatgtggagaaagtgggagagactgatgggagtggagagaaagactcataaatgggagatagattgagaggaagacccagatggggaaaaataaagacagacatggatgacgatatgttctgtgggctgtggggaaacaggcattcttgtacattgctagtgggagtgcaaactgcaaagggaacttggcaatacctcacaaaaccacatatgcaatttgacccagcaataccacttctaggaatctgtcttgaagatgtatttccaacaacgggaatatatatatgcgctcaaggttattcactgcagcatttctggaattacaaatctaagtgctcattcatgggagactgaataaactatggtttgtctataaaatggagtaccaagcatctctatcaaagaacgagaaagacaatgtaaaactgacatggagtgctcaccaggatatactatttagtgaaaaaataacaagcaagagcccatctgtagtaagctactgtccatgtaagaaagaaaggatataagaaatataaggctgagcgtggtagctcacgcctgtaatcccagcactttgggaggccaaggcaggcagatcacctgaggttgggaattcaagaccagcctggccaatatggtgaaacctcatctctactaaaaatacaaagttagctggacatggtggcacgtgcctgtaatccaggctacttgggaggctgaggcaggagaatcgcttgaacctgggaggtggaggttgcagtgagctgggatcgcgccactgcactccagcctgggccacagagtgagactccgtctcaaaaaaaaaaaaaaaaaaaagatatacaaagaaagcatattcctttatacaaaagaaatataaaaaggataaagcagacactaaagctgtaagttactgctcacacgtgtaatcccagcactttgggagaccaagaagggaggattgcttgagcccaggacttcaagaacaccccatctcttaaaaaaaaagataggttactgttaggggttgaatcgtgtcccccgcaaaaaggatacgttgaagtcctaaccacctttacctcagaatgtgatcttatttggaactggggtcattgcagatgtgatcagtcaaggtgaggtcatcttggaggagggtgggcccattatgactggtgtccgtatcaggagatggcagtgtgaagacggacacatgggaagagcaccatgtgacagcgaagaccggtcggcgtttgtggctacaagctgagtcacgccagattgctcgcacaccgtcaggagccaggaagaggcaaggaaggggtcagagggagcacggccctcccaatacctttctcagacttccagcctcctgaactgtgagatgataaatgtccatgatttcaaacaaacaaacccaaaatggcagacatgggagagggagagggagacagctaaaaagataattacaaaggaaataggccaggtgcagtgactcacgcctgtaatcccaacactgggggaagccaaaacaggaggatccttgagccagggagtttgagaccagcttgggtaacatagtgagaccctcgtctctaaaaaaaataaaataaaatgaattagcctggtgtggtggcgggcgcctgtggtctcagctacttgggaggctgaggcaggaggatcgcttgagcttagaagttgaaggctgcagtgagccatgatcgtgccactgcactccagcctggttgacagagcaagaccctgcctctaaaaaaacaaacaaaaccccacacagatggaaagttactttgtgaaacagatacaaaagatgaggagagatggagagagtgaggaagggagacaggtctggctgcaaacaaaagggctgtcagaggcagggaaatgtcacctgccctggagctgcggcctgtcaccatgagggatgcactgagcatgcagtctggcacagatctggctgatagatgttggggatcccattgccagcggcctgtcacatcccctccccatcgcctgtttccagagctgagcccagcttttccgtagcactgtggagatgaacctgtcatggggctcagagtgtggtgttgggagtagccttggcctggtgcctctgcctcacctgccctccgactctgctgcaaacagtcagttcctgtttgtgggggcttgcacaggggcagagggatggacgagctggcttgctcagaacctcctgccagccacaaactgagctgcgcttgttttggacgtggtagactgaggggcccaggaaggtagtccacatagtgaaagtgtggcaggacacctcaggaggggagagtggttagatcttgcctcccaagatcagggacaaacatctagagcttcccttcctctagaccccaaactactccctggtgctgggatgtggggagactcagggagcctcttggtcaagtcccagaagctcaggcccccaccaagctggtgagtttttgcctccccgcttcagctcctctgactttcttttttttttgagacggagtctcgctctgtcacccaggctggagtgcagtggtgtgatctcggctcactgcaagcttcacctcctgggttcacgccattcttctgcctcagcctctcgaatagctgggactacaggcaccggtcaccacgcctggctaattttttattttgtatttttagtagagacgggtttcactgtgttagccagaatggtctcgatctcctgaccttgtgatccacccacctcccgcctcccagagtgctgggattacaggtgtgagccaccgcgcccggcttcctctctgactttcagtgggacctttccttctcacccaagggacggggcctcttagagcccagcacatgggtggggcagagactgtaggcctgggggctacatggcagggagggagtgccagagttccttttgtctttagggttcctgagagcccgatgctggcacaggatggtaagggattgggtaaatccattcacctctctgggccttggttgtcgtatctgtaaaagaagaggaaccgtccctgccctgagtggacgtgaacgtgggtgtggatctgtgggcatggggtggggggcggtagagcactgggctggcctccagagtggctgcttcctactctctttagggtttgccctgttcctgtctgttatgtagcatggagctgagggccaggagacctactgagcattcatttattcaacaatcaattacaaagcacctattgcatgccaggcattgtgctgggcaccagggagacagcagtgaccatgtcagataaagcccgtgaggccatggagtttacagtctagtgagagaagggtaaacagtgaaataaaacaataaagatcgtttcagatagtgacccacttcactgaagaaaggaaggcagcttactatcatgttatgctgtgatttggagcaggagggtgggaggctttctgaggagaggacttttgagctgcctgttgaagggtctgtgggagaacattccaggcatggggagagccagatcgaaggtcccaaggcaggacagggcagctgtattgagggatgtaaaaaaggccagagtggcggtggcagcaagacagagagaagggctgggcagaggccacctgcaggcctggactgagagggcctggtgaggagactgttagcctgagaagggtgggaaaccgtgggagggcattgcaacgcattctctaggccggctatgtgaagagcaggagggtgagagaggcagcctggaggcccacccgtgagaagcagattgccatggtccaggcagagatggtggtggttggacctaggcagggcaaggggtggtggagctgagagggaccaagatgcctgctctccatagctccaagcacacagacactgctctaggaaggccctcccagttgccatggattagggggtgggaggggaagactggctgctgggagggaatgtggctttgtgcttggaaaacaaagaacagagcttggggccctcttctcctgggggtggtggcaggcccagaggctgttgacaggaccagaggctggagctcagggctaggcctggtaggagcaggctacagccccagggatccaggagggggtaggtgcccatgcagagggaccccagagccctccaggggtgaaccctgtggctgctgggcttggggcagggagcaccaggaaggaggacagataattagcggaatgctcaaccctgcagcctgggagccaggctggtggaggacatttgggcaacagtgccctgggccctgggcttgggacccagtgtagagacaaatgcgtttgggagccagtggtggccctggtggctgtgtgggagggacaggaggagtttgacaggactctgcctctgcctcgcccccagccctgctgctgaggccgcgccctccccgccctgaggtgggggcccaccaggatgagcaagctgcccagggagctgacccgagacttggagcgcagcctgcctgccgtggcctccctgggctcctcactgtcccacagccagagcctctcctcgcacctccttccgccgcctgagaagcgaagggccatctctgatgtccgccgcaccttctgtctcttcgtcaccttcgacctgctcttcatctccctgctctggatcatcgaactgaatgtgagtgggggcgaggtgggggcacaggccatgttgcaggccacccgggcctcagtttgtccatctgccacatgggagggctgcctctcccctggggttggttagctgggtaaaatgaagactgggaggaacaacaggggttctcatattctgaatgaaggaatgtggaggggttcggaggggttgtgtcatttggccaaggtccctctgcacccaagtgtgtgaaggcaacggccttgaacctaccctccagctgagttcatgctcttggcctctgccccatactgccccctagtggaggctcccgagagaggaggagggggagacccagctctggcagagctgttgaaacctttgtcttctttctgcctgccactgccctctggctccagttggttcattcattcgtttgttcgatcattcattcattcattcattcattcattcagcaaacattttttgagtctctgctgtgtcccaaccactgtgctaaaaccagacgctagccaggtgtggtggtgcacacctgttgtcccagccgtttgggagtctgaggtgggaggattgcttgagtctagaagtctgaggctgcagtgacccatgattgcaccactgcattccagcctgagtgacagagtgagaccctgactcaaataaataagtaaataaaagcagagggcacagtgggaagcaaaacaggaaaaactcccagttcccagtggctctaatgagatgctgccgggcagcctggagaccagagctgccccacccccaccccacgcagtgcttggcccaccctcaggaacacagtctagttggcagtggcctgatctggtctccaggcagggccaagcccacataagcaggagccctggaagcagggcaccccaggctcagttctgtcccagctcctcctcggctttggcccgatgacctcagcaagggactcagccccttgagtcctcccctcgttttccttctgcagcatgggctccccatcagacttccggatggcaagggcccttcctccaggtctcatgcttatgtgacaagaaaacaatgtcttgttaatagaggtgatgagctcagagaaggggccagctccgggcaaagagattaagtttgattctgggcatgttgagctggagggagagacagggctctgagggtgactgtcgattgtgcaccagagatgagctggcaccttcagtgagctggagccatggccatggatggccctaggggccatcttacccatgaaaaagctgtggcccagcaggctcaggaccttctgcagagcttctaaggtcttaggcagacttccttttcaaggtcccatccaacatcaaagcaaacactaaaacttacctgcatccttcattgaatacttgtttccttacccaaaaagagctgaaaagattttgataattttactttcgttttgttttgttttgagacagggtcttgctctattggccaggctagagtgcagtgatgtgatcatagctcactgtagcctccaactcctagattcaagggttcctcccacctcagcctccccagtagctgggaccacaggtgcatgaccacatttggctattttttttttttttggtagagatggagtctcactatgttgcccaggctggtctcaaactcctgggctcaagtgatcctcccatctcggcctctcacagtgctgggattagaggcatgagccactgtgcctggcctctgtaattgtgcttttgaagttatttggctgtgttggctgcgattgctctgcagtcctcatgcgtacctgggaattcttgcaaagtgagaagatctaacttactaattgttttcagatgtcatgaaacatttcagaatcctgcactgaacaattagtagagtccacatgatgtttcccttggcagacatttaattaaaattgtattgattttcagtcttgtagttttacttttgtatttgggagcatatatttttagttcgctgacagactgtgtctgtgttgcccagtggttacaaggactcagtagggtcgtgctgagcagggggtttggagccagagagtggcaaagcaggggctgagacttggctctcccgagtcctgatcggtcagcaccggtgggtgcccaggctggaaagaggaaggaggacagagctctgaggcctagtgactgagggtggaaggggctgcagagcccagggcagagtctgaggagcaagaggagtgctgggtggtgtgggttgggtgggatggggtgggtgggtggcaggcctgggggcctcaccggcagccagaggagaggtggcatcagatttcatggagctggggtgggcttgaggaagaggcacatggtggggctgtgtgctcagtgggggagcatctgtatctttaacaagcccccccagatttggctgccctgctggagagcggaagccccagtctaggcggttgtgaggggtcttcctctccagggctcctgggctccatcgcccagagtccctgtgtcctcccttctccagggtggctggtgccccacctgaaggagcctaggcccgtcacccccgtcattccaaggagtcaggtcgcagtctggcctggtgtccatccagttccctcaaacctctggacattggagtcagggccaaggcctcaggggtcctggtgaaaatgtctggtgggctggggtagggacaggggcaaggacacatccactccgtctccacttcaccctctcaagcagcgtgatggattttgcccattaagcataaacctaatcaattgatttgccacctgaggctccgtctgacaccactgcccacccccaccccccatcagcccagatggattatggctgggaagatggagcaccgcagtgctgggagggagatgggattctgtcagaggtgggctttcggcgcccttctgctggccctgtatagggcgcattgcctcccctgcacagccccgaagcctccaagcctgccccttcctgggcagggtgctggaagctagccctgcccatcggggcggcctggatccttagaggactggtattggtgcctgaggtctctggccgtgggctgagatcccttggtgcttccagggccccctgggtggtggcttagcatcaacagcctcccctccaggttcctccatcccctacctcttgccccttccgggaggtgaggggcagccccaggcccttgcttctacctgcagagctcttcctgtctccctctcacagaccaacacaggcatccgtaagaacttggagcaggagatcatccagtacaactttaaaacttccttcttcgacatctttgtgagtggccttggctgatcctggggaccccggaggcagagagggagcagggaaatgacttctgctgggttctcttttggcagcatatatccagtctgatcagagactcggctcccatccttcgggagccatcagtcattaaaacctttgctccacaaggctgggcgcagtggctcacgcctgtaatcctagcaccttgggaggctgaggtgggtggatcacttgaggttaggagttcgaaaccagcttggccatcatggtgaaaccccgcctctactaaaaatacaaaaaattagctgagcatggtggttcgcacccataatcccagctacttgggaggctgaggcaggagaatcacttgaacctgggaggcggaggttgcagtgagctgagaccgtgccaccgcactccagcctgggcgacagagcgagactctgtctcaaaaaaaaaaaaaaacctttcctccacaaagcccccttcagagagccccaggtgggagagggaagataagacccctgtgcaaggttacatccaaattgtcccagagacatgctgactcagtcgttgtcccctgaggtgtgcatgcccataggaagggaacgtgggggcaggaccagaggggaggtcagcctgcagcagggtggggggcagtagcttcctgtgactgccttgctcccgtcccccaccaggtcctggccttcttccgcttctctggactgctcctaggctatgccgtgctgcggctccggcactggtgggtgattgcggtaagatgccactttcctggcagcttctgggccctggcagggctggtggaagggatgggatggaggaggactcacttcccagcctctgccttccccttcctccctccctcccctgggcaggtcacgacgctggtgtccagtgcattcctcattgtcaaggtcatcctctctgaggtcagtggctcagggtctggccagtctggtgggcatcagacctgagtggtatgcttctagagaggagcatttctctaatttggggtgtctgtccctgttgtccgggttagggggagagggaatcctgtcctttggtatctataaggaatcatccttcacccgcttccctgacttagccccttgcagctctaggaatcagaaggttctttctccagcctaaccccagtttatcctgctgcagacttgagagggttcccaagcagctgctaccaggaatggggtgtatgccagtttggctggctagagttggtagccacagaagggggctctgggtttggggtgacccctgccatggagctcagccccctcccttcacagctgctcagcaaaggggcatttggctacctgctccccatcgtctcttttgtcctcgcctggttggagacctggttccttgacttcaaagtcctaccccaggaagctgaagaggagcgatgtgagtgcttgcgggtaggggggtgcagcgagggttacccacagccccaagagaggggagttgcgggcatgagagtcagtctgaagcatctcgccacctctgagcagcctccagtagcctgagggggagcttgggtgggggtaccccaggctgctagggtgtaactgtcctcggtccgggaccgagtctgctcctccagggtatcttgccgcccaggttgctgttgcccgtggacccctgctgttctccggtgctctgtccgagggacagttctattcacccccagaatcctttgcaggtgagggctggtgtgtgggggaactgctttcagggaggggccttgtgaggaatggggtaggctgggtctgttctttctattccttctatcaggctccctggggaaagccagcaaccctctcccacacacttttatcccccacatccttgcactcacatacccgaaccccactacctccccacactctctccccaccccttgccattgtcatctgtgcctgttttctgcagggtctgacaatgaatcagatgaagaagttgctgggaagaaaagtttctctgctcaggtatttgcctgcctacccctaacccctgcccttggaatgggtgcctggaggagggcgggtgcaggggtcagccggggtgggcaggggtttcccagtagaggctgaacctcgggcaatgcccatccgagtgtctcccccaccaccagtccggcccccctggtctgcctcatgcctgggcacacaggtggagcagccacaagcctgcagggcccagggagaccagcccagatcccacatgtggctgggccaggcccctctgggaagcatgtggtatgtctagagagagaacaggccacgaacatggtggactgcaggccccaggctgacccctccctgcctcctgcttccgtccaggagcgggagtacatccgccaggggaaggaggccacggcagtggtggaccagatcttggcccaggaagagaactggaagtttgagaagaataatgtaagaagccctctcccacctgaccttcccatgcgtgttaggagtttctgttctcttttctgaggcctgaggaagaaacccaaagattacatgggttggagccatattcctgccccaagagagggagctgggccctcgggtcggcaggaggctgggctggattggacgtttcccccgtgccccttggccccccttccccgcaccccccatgtttacttccctgctgttctgcccccttggctccaggctttgaaggggaagccaggcttctgctctgcatccgttgtttcgtttcatgatcaaaacaacattatctacaaagatcgtagagagcttggaaaacagagagcaacatgccccagtccctctctctggccagttcttgtggcagccccattggcctggagacatggttttttgtggttgcagctgcagctgtccccccgtcttttaactcgacatcaaaagcctctctcctgccagtgccataggtttgttagagctactgttttgtaacagctgctcaggtgtccccaaactcctggagttttccaccctgagctgttaaaaacctgccctgcctgtcacccatttctgtgccaccagcccaccccctgcctccactctcctccctgccaccttctgtccctgccataggaatatggggacaccgtgtacaccattgaagttccctttcacggcaagacgtttatcctgaaggtgagtgaggggagcgggtgtcctggagccccagacagcacaggaggctccaggaaggtgccgaggggccctctggtgggtgccccccaccaagagggaagggttggtctgcccgagcccatctggcaccacccagccctctgccgccctgtcccagaccttcctgccctgtcctgcggagctcgtgtaccaggaggtgatcctgcagcccgagaggatggtgctgtggaacaagacagtgactgcctgccaggtgagcccagtctggctgcctcttaaggcacagatgggggcacagccacgcctcagtgggatcactgaagcactcagcgcctcagctgccccatctgtacagtgggtgtgatggtaacagtgcctgctcgggagggtcgggaggagggcaggaggagtgctcatcaggcgctgcccagggcctgcctgtggcaatagcagttagtaaaggggcctggggtgttcccatccctggggttttcctggggcgacctgttccaaaagtctccgttgacggccctcagatcctgcagcgagtggaagacaacaccctcatctcctatgacgtgtctgcaggggctgcgggcggcgtggtctccccaaggtgagtccatgccgggccccctcctttcagccaggtcttctgcactttggccttgggtcattgtcccctgaactaaccctccctcccgcagggacttcgtgaatgtccggcgcattgagcggcgcagggaccgatacttgtcatcagggatcgccacctcacacagtgccaagcccccgacgcacaaatatgtccggtgagcctcactttgcctggggtcacccctgccagcccctcccctgggagcattgagcagtgcagggtacagcatgtacagctgggcacttcccctgctgaggctgcgttcctgttccctgtcccgctgggctctgctcctcctggctactaatcctgctaatcttgctgctctgtctgtggagatggggggtggtggacagctggaaccaagccaccaaggctggacgggatgtgcggcggtggctggctggggtagaccatggatggggacccgtgcagggaaggggcctgagagccatgtgctcactctgggctgattgacctgagcaggaggctctatgctctgggtttcatcttcctgcctaaggagactcgggtcccctttcgtcctcctcaccctgtcctcactccgtcatctttctctggagtggctcaggagttcccccaaagataaagggattatggccttcccgcatctgtgcctgggcttctggagtcttcccttttgtccagtcaggctgtggtgctgcgggtggccccctcccatagaccccactcttccccatcccctcctgggttccagcaggagcactgttctttgaataggatgccaggctctgctttgggcactggacagacttgctgggtgcagggaagctcacttcctctctggatgccaacttccttatctgcagaatgggcttaggtgtgctcagtggagctgagggagaatgaaatggtgatgggatgtgaaccgtgcctcccaggcttagccttctcctgagcaggtgtcccctcctgaaggggaaggggtaagaagcgccagcccagcctactctgccatagcagggctgacctagaatctctggacagagtgtatgagggctgggaaggtggtgagctctctgtccctgggggtgtgcaagcaccaacaggccgttgtaggaggattcaagcatcacagagtgggtgggggtggagggccgattctgcagcccatgggacacctgtgctaagccttgttcagatagggtagctctgcctttctgcttccagcccagtcccagctgggccaagaatggagtgtgagtggtaggggctgcgggggggtgtcagggcctcactctgttccaaagtccccccaatgatgcctctttccataggggagagaatggccctgggggcttcatcgtgctcaagtcggccagtaacccccgtgtttgcacctttgtctggattcttaatacagatctcaaggtggggtgctggggggctgccaggtgggttctgtggagtggaggggaccctgctgctgacttggttgctgcatgactttgggggctctctgccatgcctgggcctcccctttgtcagccacctttcttacttgaaaatttgggtcagggtccagatggtctcttagccctgggttgctgtagggcatgtgcccccccttcttacctctgagtcctgaggccctgaggaagggtggctggtggccagcccggccccaccctggtctgtttgtgttgctggtgccaagagccaggcccagcatgttcttcctgccaggggtgagtgggagagggcgacccaggctggattccagagctgcacctgcattctggcccagagcccccctgctggtgccagctgcaaggggagaccctgctgagggcaggccatcaagtgtgacttctgcctgccttcccccagggccgcctgccccggtacctcatccaccagagcctcgcggccaccatgtttgaatttgcctttcacctgcgacagcgcatcagcgagctgggggcccgggcgtgactgtgccccctcccaccctgcgggccagggtcctgtcgccaccacttccagagccagaaagggtgccagttgggctcgcactgcccacatgggacctggccccaggctgtcaccctccaccgagccacgcagtgcctggagttgactgactgagcaggctgtggggtggagcactggactccggggccccactggctggaggaagtggggtctggcctgttgatgtttacatggcgccctgcctcctggaggaccagattgctctgccccaccttgccagggcagggtctgggctgggcacctgacttggctggggaggaccagggccctgggcagggcagggcagcctgtcacccgtgtgaagatgaaggggctcttcatctgcctgcgctctcgtcggtttttttaggattattgaaagagtctgggacccttgttggggagtgggtggcaggtgggggtgggctgctggccatgaatctctgcctctcccaggctgtccccctcctcccagggcctcctgggggacctttgtattaagccaattaaaaacatgaatttaaaaaaaaaaaaaaattccagcccctcccactgccttgcctcttgagggaagagaaaggcaggcagcagcttggatgaagagggaagacccctcacacagcctctcctgggctcacaggagggcggagcccggggagccagttcctgaaacatgccccccattccccccccgcccaccccccactccccgctttcctgaccagttcaactgagcagatgactggtcagaaaaaaatgccccgccccctgccaggcttcagcggggcaagtttaaagtctctagtccaggaatggaggtgggggtatgggcacctggcagtgcccacagcaagccttgactgtgtggcctggagatggggcctgagcttcagggtcactgaggcacctctgggatccaggccacctggagccccggacctcccagactccactcacccattccctctccccgcacggcactcacaccaggggcggcctggagcccggatcgcagggcggggccaggccactgcctgccttcctcctccctcccggctggcctgcccccttgcctgcctgcatgcaggcttccagcagagccagcttcttcagagccaggtggatcctgtttcggtcctgcctaggtgtgtgaccctgggcgaatctacctctctcagcttctgcttcccactttatgaaaatgggactgatgtcacagggttgttatgagattaaaagatatgaagaaccggggacagtgctcagtaatcaatagtctgcagttctgcacccacgtgctcctgggtactctgccgtccccacagggtcctcagctcagcccctgtcactgcctctcctgccaccctttgtccactcggcagtgttctcactcctcatccccccacacccaccacctgtctgccagcctcttgcaccatgagttgctactcctggggtgctggactgtccccacagccatctgtctcccctgctccccatgaagaagagccagtcccctcccaggtagcacatcagagcgggcaggctccagagctcttctggtcctcttgcagtggccagaaagtggggaaaggggcccagagaggggcagggactgacccatggtcacacagcctatttatggctgatctggagccaggccttctgactatcacccatcagagcccctggattcccatttcacccaacacaggtgttggggtagaactgggggccctccacccctactagcctgactgtctcctgagacctgtctcctaagaccacttacctgaccactggccatggggaaggaaaacacctggccaaggctcatgccccaggttcccaggcatgaagttgactgtctccgcccctgctggtgtggtgagggtgactggggactaggcactaggcctttggtgcaggcgcctgaggacgtggttgcactctcccttctggggatatgcccttgagcccaggcagaggagagcacagccagggcaggacctggcagccctggtacagagcccagagggggcatcagttcctgctggtcctgctctgtttacagacaagctgctgtcctccctgcaaaggggagtgggtggggcagagggcaagtgccaggggggcacaaggctgggcatgtggctggcatgagacggtgtctgagtaatgtcaggcacctggaggcattgaccccaggaccttggaccccagacctctgaccggggggcagccagcgtccaggtaccccaacccctgccctgggtccggcgtccccccattagtgagtcttggctctacttatagcatctgacaccagaggggccgaaaatagcccctggagaagggggaggagggggctatttaaagggcctgggaggggagagagaatgaggagtgatcatggctacctcagagctgagctgcgaggtgtcggaggagaactgtgagcgccgggaggccttctgggcagaatggaaggatctgacactgtccacacggcccgaggaggggtgagtgtgggtctgctagagccctgcctctgctcccccagagcaccctcactgagccatgaggccagagcatgaagccctggagaaatttctgggggtgggggcaggaagaatgccccatggggagagcaaaggggaaccacccttcctgcccccaggtcccagcagcccaggggagccccccacccagcctgtgcccagagagcaacagctcccaggagctcactgcccctcccctctccccagctgctccctgcatgaggaggacacccagagacatgagacctaccaccagcaggggcagtgccaggtgctggtgcagcgctcgccctggctgatgatgcggatgggcatcctcggccgtgggctgcaggagtaccagctgccctaccagcgggtactgccgctgcccatcttcacccctgccaagatgggcgccaccaaggaggagcgtgaggacacccccatccagcttcaggagctgctggcgctggagacagccctgggtggccagtgtgtggaccgccaggaggtggctgagatcacaaagcagctgccccctgtggtgcctgtcagcaagcccggtgcacttcgtcgctccctgtcccgctccatgtcccaggaagcacagagaggctgagagggactgtgacttgggctccgctgtgcccgccctgggctgggcccttcctggctaggactgtggaggggagctgctggccatggctgctttgtagtttgcccagagttgggggctaggggaggggggagccagaggccaggatgcctgagccccctgagttcccaaagggagggtggcagagacagtgggcactaagggtggagagttgggggccagcacagctgaggaccctcagccccaggagaagggacaaaaggtactggtgagggcaagaggtgcctgggaggagtggccctgatccaggaaaatgtgaggggaatctggaacgctctaggcagaagaagctgggagggagggggaggtgaaaagggcagaggcaaggatggtggggcccccagcaccctctgttagtgccgcaataaatgctcaatcatgtgccagagttgcatctctttccttgtggttgggggggctggcccatgggtgtcccctcaatgcccacttctgggaccaggctccgcatctgagctaaatatggcagagctaatgggtacaccccatacttggggtgggggtgggggcaggacagagctgtaaacagggtgctgtctccagtctccttcccgtaccctgaccgctgcccagtcctggcttctgtgtccagccccctggcactgggtggtaaccagcaagccagctggcatccgcatccagggtttgtttcaatgatgtctcgtggagaatatggaggggctggtgccaggactgtccttggctttgcctcggggtgtgaacggggtcagtgacctctaaaactaacctgcctctcagttctgaatccagacagaatcaatcctcagctgtgtctcgctccacaccccctgccctggaagccagggaaggttggaggtgctagggggtcaggctcccctctgtgacccctgcagctgttgtggtgactcatgtcccaacctagctgcctctcccaaggagactttcccctggggacaagggggagggaatggcatggaggaggcccacatcaagcggggccaggaacccacggtggcaggagctgggctggtgacctacccagggcagaagggcccgggactcatccagaggggaaggaaggggtcttcaggaagaccacggagatgccacaggcagaattggcttcccatctgggagataggtggggagaccctggcattttgacagccagaacctggggtgctgagcagaatcttcatgcctggcctggccgctccttcggagggaagctggagggtgggctgcgagaggagtggggtcagagcccctacatccgcaggaccccaaatcggctgggccccaaggcccggactgcgctccccggtggccccggcggccctccgcgaatgcgtcctgcccctcccctgcccaagccctctgccctcacccgggtccggcgccgcccccgaagtggcgggaacaacccgaacccgaaccttctgtcctcgggagcccccagataagcggctgggaacccgcggggcccgcaggggaggcccggctgttccgcccgctaagtgcattagcacagctcacctcccctatcgcgcctgccatcggacgggcagtgccgcgccctgctctggggcccccggagcgaccacagcggaggccggaacggactgtcctttctggggcggggtggggagggggtgtcgctggagggcccggtggcatagcaacggacgagagaggcctggaggaggggcggggagggggagttgtgtggcagttctaagggaagggtgggtgctgggacgggtgtccgggagggaggggagcctggcggggtctggggcctcgtcgcggagggcgctgcgagggggaaactggggaaagggcctaattccccagtctccacctcgaatcaggaaagagaaggggcgggctgctgggcaaaagaggtgaatggctgcggggggctggagaagagagatgggaggggccggccggcgggggtgagggggtctaaagattgtgggggtgaggaactgagggtggggggcgcccagaggcgggactcggggcggggcaggcgaggcggagggcgagggctgcgggagcaagtacggagccgggggtgtgggggacgattgccgctgcagccgccgccccactcacctccggtgtgtctgcagcccggacactaagggagatggatgaatgggtggggaggatgcggcgcacatggccccgggcggctcggcggtcagctgccgcccccacagcggaccggtcggggcgggggtcgggcggtagaaaaaagggccgcgaggcgagcggggcactgggcggaccgcggcggcagcatgagcggcgcagaccgtagccccaatgcgggcgcagcccctgactcggccccgggccaggcggcggtggcttcggcctaccagcgcttcgagccgcgcgcctacctccgcaacaactacgcgccccctcgcggggacctgtgcaacccgaacggcgtcgggccgtggaagctgcgctgcttggcgcagaccttcgccaccggtgagcgggggaaactgaggcacgagggacaagaggtcgtcggggagtgaaagcaggcgcagggaaataaaaagaaggaaagggagacagaccaggcgcctaacagatggggaccaagaaacaagagatagctgagaggtgcaaacagaagagaaaaaagagcaacatcccttaggagaggggcagaggagagagaggtggagagagggggcggagagtgctcagaattgagagctaaggtgggggatgcaggacagactgaggtggagatgcataggaggaaatggaggcagatgtgggacaggggtgagaaactgccaggatttcctcgctgagcctggctggtaggtatagttgttttctttctttttctttattttattttcatttatttacttatttttattttttatttgttttgagacggagtttcgctcttgttgcccaggctggagtacaatggcgccatctcggctcactgcaacctccgcctccccggttcaagcgattctcttgcctcagcttccctagtagctgggattacaggcatgcgcccccatgcctggctaatttatttgtatttttagtagagacgggacttctccatgttggtcaggctggtctcgaactcccaaccttaggatccacccaccccggcctcccaaagtgctgggattacaggtgtgagccactgcgcccggccagtaggtatagtcttctagatgtgaaacctgagtctcagagcggtgaagttcccttccgaagggcagcccatgttggagctgggttcagtctaactctggggccaatgctttttccagatggagacacatttgcagaggagaaggaagaactagagagaggcagggagatgcaggggagggaagggtaaggaggcaggggctgcctgggctggctggcaccaggaccctcttcctctgccctgcccaggtgaagtgtccggacgcaccctcatcgacattggttcaggccccaccgtgtaccagctgctcagtgcctgcagccactttgaggacatcaccatgacagatttcctggaggtcaaccgccaggagctggggcgctggctgcaggaggagccgggggccttcaactggagcatgtacagccaacatgcctgcctcattgagggcaaggggtaaggactggggggtgagggttggggaggaggcttcccatagagtggctggttggggcaacagaggcctgagcgtagaacagccttgagccctgccttgtgcctcctgcacagggaatgctggcaggataaggagcgccagctgcgagccagggtgaaacgggtcctgcccatcgacgtgcaccagccccagcccctgggtgctgggagcccagctcccctgcctgctgacgccctggtctctgccttctgcttggaggctgtgagcccagatcttgccagctttcagcgggccctggaccacatcaccacgctgctgaggcctggggggcacctcctcctcatcggggccctggaggagtcgtggtacctggctggggaggccaggctgacggtggtgccagtgtctgaggaggaggtgagggaggccctggtgcgtagtggctacaaggtccgggacctccgcacctatatcatgcctgcccaccttcagacaggcgtagatgatgtcaagggcgtcttcttcgcctgggctcagaaggttgggctgtgagggctgtacctggtgccctgtggcccccacccacctggattccctgttctttgaagtggcacctaataaagaaataataccctgccgctgcggtcagtgctgtgtgtggctctcctgggaagcagcaagggcccagagatctgagtgtccgggtaggggagacattcaccctaggctttttttccagaagcttccttgaggctagcattctgtaccactcattcttcccaaactaaggaaggccaaggtcaggggagctcaccgggcacctgcagtgcaccaggcacttgtgatatgccattgtgtccatcgcatcattcattcctgcattcagcagcaggtcctgctagtctgtttccaggtgaagctcagagaggtgaagtcacaaacagtgcagactgcttcagaccagaacgagggagagtggggatcatgaggagatggaagtagaatctgcaaggtggtggggaggtgggggtgttatgattgaagcacaatggccgagggaagtgaaagggaaagaactggctccagctccctctcacaactggacttgagttctgcccagctctgcctctggggcctgccattccccatgccacgtgcccaggcagagacctcacctctgtttactgcctccagccagctctgggacctgcccctgccgccacaactgtcttctcctgccctccagcccaccctattcacacaaatgagctgaacaagggcaggtgaggcttggaattgatttattaagcacatcccttgccaccctcccaccttaaaagttttcagtatcaaaagaagctagcgcaggccacccgagtccctgaggttggagtcctagcatagctcccctccctcaaagagggacaaggggtcaggggcagagcaaaaatccagtctgcttcaaccacggagactgcctttgggatggaaagtttctggagctccctccattctattcctgtggggcaggaacatgccagggctgctggtaaatggcaggggtcacctttaccagggcgcaggcatagtgtggcccctgcctgccctggggccaccctggaacagtaagaccctctgggaagggaagaaaccagacccagccataagctttctccccttctccctcaaatcgccccttcctcctccccaaaatcaggctatggcaaaggggctggcagcaggggaatggaggttttggaggggaaggccagccatgcgaaggcaaggagaaaaggaggatggagagagccccagccatccccattttccttcctctgcctccgaggggctgcttctggagggcactgttgtgtggggaccctgtgaggtttgcaggaggcgggcaaaggggcaccagacagggaacatgcacacaggcagcctggccatggagagctcctggctgtccgcccaggtggcgccttgggcagagctggcgctccacaagtgattattgatggtgacaggattccctcatcctgctccaacctctcaactgtggacacattcaccggcagtcactcatctcacatgcccaccagcacgcgcacacacgttcccctaacccacgctaacacacccaccccctgcacacacacactttgaagccacacctcttccccgacaacacccgtctccacactgcgcacctaggcctgagctcacacacacccaggcccatgctcacggccctgtcacctatgcactcagcctggcccacactcccgacacacggtggcaggctctcaaccagacagcagcacaggatccttgccctgggcttgctggagccctggccctgaaagggagtatggtgaggcctcctgggaacctggctagggcaatggtcagggtgaaactccttcccaatcccagcagcttggtccctcaagatcccatggggagaatcgccgtgaaccttggctggccaaagaacaagcatccagcaccacctagtggtgtcctggaggagggtggggggtggtaacagaaggggaccccctgtatccctaaggcctgtggtccctggtctcccaggtagacagagggcttcaggacccagccaggcagctggggatgtggggaggaggctgatggggaggaaacaggcagctgtcctcccggtagagctaagagcacactcagttccaccccagttcagctccaggaggtagaggggctgcccactctcgagtcccagatgctgggaggccttccctagaacagactccaaggctggtgagggccaacagggggtgggctggccacatgattctgggcccacatccttcatgtccaagttcaagaagttgaaaagagaaaatcatctcaagggttgaggggagaagggaggccagcagggcgggggcaggatccccactggggcagactcgctccaaggtcttcagtccagcttgaacttgtcctctgattccttcagcaggtacaggctgtcatcttccagaaagctgtgggccaaaggagtagcccattgaggcacacagctctgacagctcgcatggagacaagggtggggtgcatgcaggcaaggtgggagggggcggatgggcacacagagcccccaatctcccctaaggagtgggcaaggaagggtccaaagaaggtgagcaccaggcagggggcagcacccacctgaaaaagaggacgtggacagggatggtgctgatgtgccagatggcatgggcatccaggacccagaagagcggtgggaagtcaagcagctcgagcagggacagcccctgcagcagcaagaccaccaccacgcacttgcgcacgtgaggcagccgccgctggttccacaggcaccaggccagccaccacaccacgttgaccaggcctgggtgccagtgggggcaggagagactcattccttcggctccttctccccaaggccacccccaactccatgctctctgaccccaggatcatcctcggactctcctcccagcctcctctctctcccacctcaaattcttctccattcctctaccccaagagtctctctagaacctccttctccaggaatggcaccaacctcccactcgcaccccaagctagcacttctgcagatggcccaagccccccagggcctcaccaatagccacgttggccaccaggttgtagccatagtcgaagcggatgaggctcaggtaggagacgtgcacggtcagcatgagcagcaggagagcccggaaggcactgaccacagctgggtgctgcagccccacggtcctgccccaccgtccagggttgctcagagggcaggtggcccatccccagagcagcattccctgaagcatctcctccccccaacattggtgcatggcccctgaagtcactacccctctccccaccaaacaggccacagctgggcagcaagtgctacagctccttgtcaggagccagggcccccagtcctaccccagagtcctcacccaggacagctgatgtgttgggggttggggggcgtaggtgttgggagactagtgaagaaggcccccaggggaaggctgggtgacccctttctgcccccagggttcgattttgcccctgcagccacccaggcaggctcacctgacgcagcacaggtagattgagtgtaggatgacagtggaggcacagaagtagtccattttctgaggacagggaagggtggtgagggaccagcatgaggcttcacggagaggacccgcggggatgggggcatggaggagtggcagagaggggccggggtcctgggcctgcctatcactgtttcactctgactgagtcttgtgttcacatcaccatacaagtttttaaaaatgtgcccaggaacaaggctttagggacgctggtggagggttcctgctgaggctccaggacatgaccacgctgcacagaattcagagcacagtgtggagtctgacagccatggggtcacgtcctgtggcaacccttcactggctgggtgcccctaagcatgtggtccccctgtcgaaggctcagctgcctcatcaggcaagaagagcgaatactcatccccacctgatgaggctcactgaggatcaagggcaccaacaggtttaggatgcccaccccatactcctcccagtgctcctcagagggagttggcatgaccctctagagcccctctgcccacttctgggctcctctgggaccaccctgtgcaggagggggagctggaggaatgctcacctctgtgaggtcagtgtccctggtgtggaaaactgtggaccagaaccatgcattgagggacacctaaggagggaggggctggtgagcatgctgccccccaccctgacctcaaggcagggacccccatttgctcacatccatttcacctttgggaaggggctctgcaggacaagaaatgtgcttttcctgcccctggagccctctgaacaaacctatgtccctctacccccacccagccagggtccctggggtggacttcctgccaccccaaacccccaaggccacggggggctgcagcctccacaggttccggcctggcctgggaaccagttccggtatagccaagctccctagttactcaattgctaagacaacagcccccaggggccttgcctcctcctccaaccggcaggtgttgacagcaccaccccacccgggcccaggggagccagtgacctcagcctctgggggcgggaatgaggtgggtggggtggaggggctcgagccagcttggggtgtgttccaagcagcaggggagggagatcaagcagatcccactggggcacaggctcccaggaggagggtgaaccaagcccagcttcctcctggctgggcctgcccaacccgccagaccagtggctgctcccgagcctgggaggagtagagggcaggactggaggggctgtggtgggccagggcccaggggaatgtttgaggccttcttcctggaaattagctgcgtggagagagcacaaaagttatctagcgaatgagcctaagagcttgtgggcgttggtgctggcactttcttcagggactgctgtgtccacagcaaaggcccaaactgctgaaagcagggtgggctgaagggaagggctgggaaatcgtgacaaccaaaggaacagcaggccaggccgggaatggcctggaggtggggagggatgcgctagggtgggacaggcctggcggagatgaggaaaggccaggaactgctcagttggctccaatgtaccaggaaaactggccaggcaggggacagagggagggggcaagaagctacactctgtctggcactgtagcaggcaggtcagacagtaagatgcattccaaatgcaggtctggggagctcaggagagaatgggaggagaaggggtacaggcggggcagaactgctgcacagccagtcaggttctcggggtgccaagctctggaaggcgcaaggctgcctagtgcccctgtctggcctgggctctgggctgagccttgctgcttctgctcctcttgacctggtcaaagggccctgcccttctcagcccaagcttcccccgggacaaatcatggctcaagtgaaacttcagttcctttccagcctggcgttaggtggtgtggtctagggcaggctgcttcctcctttgaggatggccactctgtcccttccaccagactcaaggctctgccctgctgcagccccctccccagagacaggcatggaggctgcacaacaggactgaacctggtggcttctcagacactgctcccacagtctgaaaagcttagagtcagcatggggagaggagcaggcttgggctggagacgggacccaggcaatcacatggaccagttctccctggcaggccaggaacagggacatccttagggaggagagtggccctggagccaatgtgggaaggagaagaggaaggcggcagggactggcagccagccaggcctccttgtcacccacagcaggaagggggaggtgagaagaggactgcaggactgagctaagtggctcagaacaccgaaagcagggggtgtgtgtgcgggcaaacatatgcgtagggccacaggatgggtggggctgctgggtcccctctccaaccgcctccctgggtgccttccactcacagagacccacctgaagcctggcctctgcacccctgaaaagcccctcccccctggggagcatcccactctgggggtgctcctcttctcaccctttcctcagatttgggaggtagtggtatcattaagaatgcaagccctacagccagactgccagggttcagttcctggctctgcatttcctgtgtgtccttgggcaagttatttagccttgctgtgcctcagttttctcatctgcaaaatgggaataatcatagttgataagggtttaatgagcaatacaaatacagcgtacagcacagagcccaggacaggctgaaacatgagtgttctctccacttgcctgaccagcacagaaccccgtcagcttcccatagaactgaggcctaagaggatgtctgcctcccactctccctgcaggccaaggatgtttaggcagataaggggtggtctcctagctgcctaggcccacctccacagctccaggctgggggaagagtgtccagtcttcacaatgagacagagtctgcattcaagtcctgcctcagcccctacgcagctgtgtgaccttggacacataacccagtatgtgtgagcctccactgcctcacctacaaaacaggttcataatgatgctcactgcacaggaggccatgaggacgaggtctgcggaatgcctggcaccaaggaactcctctgaatggctgctggttttgctgcctggtccatagtaggtgcccatcaatgtcagtttccttcatcaggtccagtagactgactctcaccacgcccgttcacctgcccctcaacttccctttccgcaagggtcacaaagtttgaggtcaaactatggggcctcagggtctctccattccagaacggagacacctcagctataggaagagcccctcctccttcctctggagccatgttcccatcaatgtgaaccgaacagatccatttctcctcactcagagtttgtcatcaagagcaagcaaaggggaaagatgggctctggaaggaaggagagttccaagatgccaaggcacggctactctcggactccttgccacgctcaagtgaaggggggcagggaggggaactggccaggagggcgacaggctgcccagcaggcacccagagctttgcgtaaacactgaggagagggggtggccaggggcagggtgccagtgggggtggaataggagactgggtggagggagagcaagaggctgtttcagtctgttggaaataagaaaatcgagacaaaaatatcacagccgtgaaactggttggatgccaagtgagccagatctgtcaggaattcgacccggcgctaagccccagtgctcggggctgtcattgacaccatggcggtggggacaagtggggcttaaaatagctcagtgtctcagaagtgggggaggcagaatgttaaatatgatgcctgctgccatcctgggctcctctggaggccacagtgtctcaccccctgcctcaggcagggcaggccagccccagctcactcctgagagaagggagacagaggtggatgcggatgggagaaggagggctttttccaagatcccagaggatcccttgatttcctgccattgcctgttccactagctcttgtctgaccatgggaagtccttcctgaagtctaaccatcattctactacagctgcaacctacctcttcttgtagtttgcttaacagaggaagagaagaatcagtccccacctacacaaaccactctacagagatggtttgggcttcccaccacttcaccctcctctctacacctgaggacctttcctgactggatgaaggcctggggaattggtttggccttctggctttggcacacagcaggggcccctactccgtgaagtcaaagagacatggtatgcggagctttggtaggctccccacccgccgcctggctgctccccagcccaagcccaggcctaaatggcaaggcaagggctgccttcttgtgccagcgttatcatgagtcctgctggagggcggggtctcctcatttcccagaggcaaagctgaggtacccttcccccaagacttagcccggagcgggtgagggaccttgccttcctatcctcaccccaacagaaatcaggagcctcagtgccccagaaggcccaggtcaaagtccactgccgcaccctccatacagctcaggatccctccctcctgcagaaactcacagggcaactgggaagcccaagagcaactgggaaagccaaactaggccatccacaggagtgtgggttctgaggctttgtttcttgaaggcctagtgagagcatgagggggtcccatgtcccagaaccccacatcccataagacacacagggcccaactatctgccttctaccaccccaacatctaacatctcctgctttttctgtttttgtttttgttttttttgagatggagtctcgcccagtcacccaggctggagtgcagtggcgccaccttggctcactgcaacctctgcctcccaggttcaagcaattcagcctcccgagtagctgggattacaggcacccatcaccacgcctgactaatttttgtattcttagtagagacggggtttcaccatgttggccagcctggtcttaactcctgacctcagatgatccacctgcctcagcctcccaaagtgctgggattacagacgtgagccaccatgcccggccatctgctgctttttctctagggtccttagtcacactggactgcaggctaccctggggaagtgtgacccccctctccaagaaggaagctgagttgcagataccattgaggtgaaaaatccaagaatcagggatgacaagaccagatctgtgaagtgacccctggcctctggcacatgttataaagacaaggggtgggaccctccgatctaagaaggctctaagcttcttcagagttcaggcagggctgtcccatgctctctagtagaggtggggacaagtgggtggtacacgctgtgggcccagacaagcagtgtccgtggaagaaccccaaaggaaagcagacaggtgtaacgtcctcagcttccctgcccttcctgctttcttagccaggactaaatttgcttcgctccaagaggcctacacaggaagtggtggctttatctcacccagcctgtgacagtgtgtgccgatgccaggccctgcctacatcagagcccctagccctcagcctggcactcaggggcctctctgctccatctactcttctactcctattcacacagctacaatggggccaaggtttcctggaatgctggaattcaatcccctgtccccacacatgtatgtgtctaagccttgccccacacatgtatgtgtctaagtcccagattaaacctctcctcctccccgggcttccctggcctggcagacttccccagttagaggacgcggtctccccacctcacgactcccagggctctctaccggagcaccccttgactctgcctgccgtctgctgcccaggctgcccagaactgcacctcccactatgcttagctccctggggcaggggattcagcctccacaagtgctaaaccctgtctccacccccagcaaatgctcaatggacactcatcacaggacacggagtggcctagaagaagagctaagttctcaggccctggagccagacagccctggacaccaaccctgtctttattccttgctaacttgttagctgtgcattttgggcaagtttttttcccctctgaatctaactcagagctcataagggtactatgaggatgaaataaggaaatgtatgtaaagtgcttcagacaagcctgtcacatggctcctgttccttaatttatcacaactgttattaatagttgttgaataggaagtattaaggagggtccatatttcccagaggtttaacagcctccttccctgacctccttcccacgcccacctcccaagtctaaggctcggcctggacttcgcagcacgccccatctatcagcttttctaaggccctagagacctctgtgtctccagattccggggtctccttcagttctcacgtgtacaattcaggacagcagaagcctctctccttcctgtgctcatcccgggaagcacaatccaagcacactatctcccagttctccacctgcccctccggctactccttctgtctctgtgtctggctcatcttcctttagccagccattacattttggggttccccagggctttgccctagatcccttctcttttcactaggctctcctggggtgatctcatccacacccacagcttctatcactgtcttttttttttttaaagacaggtcaccctttgtcacccgggctagagcaacaagagtacagtgacaggatcacagctcactgcagcctcgacctcctgggctcaagtgatcctcccacctcagcctcctactagctgggactacgggcatgtgccaccaggcctggcttattttttttgtatttttggtagagacggggtttcaccatgttgcccagggtggtctggaacttgtgagctcaagcaatccgcccacttcagccttccaaagtgctggaaccgcaggtgtgagccactgcgcccggcctccatcactgtcttataagcagaaacacaaggggtcatcccttactgctctttcctcatctaatccactcttgaagtttatcagcatagccaagatgttgaaagtgtggactctggagccagatgcctgaattcaaaccctggctcggtgatctgtggctggacttaaccttttcagtccttggtttcctcatctataaactggggatgagaataataatacctataagctgcgttaaacaaaaattacgggaggccattgttctggattgagcccccgcactagacccaagagaccagacaaaaatgaagtcactcatgctaaatgccacataatcaaactgaaactttttttttttctgagacggagtttcactgttgttgcccaggcgggagtgcaatggcgtgatctcagctcaccgcaacctccgccttccgggttcaagtgattttcctgcctcagcctcccaagtatctggtactaaaggcatgcaacactatgcccagctaattttgtatttttagtagagacagggtttcttcatgttggtcaggctggtcttgaactcctgacctcaggtgatccacccgccttggcctcccaaagtgctgggattacacgcctgagccaccgcacttgatcttcaaactgaaactttaaggtaactgataggtcccaaaacagaccactttttcctgaaaacaggagagtccagtctacccaagtaaggaagtctcctctgctttaacccttataaaaaaaaacctgatgtgggccgggcgcagtggctcatgcctgtaatctcagcactttgggaggccgaggcaggcggatcacgagatcaggagatcgagactatcctggctaacatggtgaaaccccatctctactaaaaatacacacacaaaaaattagccaggtgtggtggtgggcgcctgtagtcccagctacttgggaggctgaggcaggagaatggcgtgaacccggaaggcagagcttgcagtgggccaagatggcgccactgcactccagcctgggtgacagagtgagactctgtctcaaaaaaaaaaaaaaaaaaaaaaaaaaaaaaaaaaaatctgatgttaaccaatcaggtttctttctattgttctgtttcctggttcccaccttacaaaacccactgttctgctattgcccaatggaaacttgcattctattttgtagaacggaggctgcaccaattcatgaatcacaaattaaagccaattggctctataagtaagtttgctgtaatttgtcttttgccacttgttatggatgaacaagcttaatacttataaaatgcttagagtgatgcctggcatacagtatgagctatgtatgtatttgttaaggaaataaatttttaaaaagctttaatgttacctccaaaacacagctcaagtgtacttctcttcaatgcccaagacccatgccacctctctagtctagctactgggccctgtgctaaaactaccaactggtctactgcatccactcccgcccccttcaatctgttctctacacagtagccagaatgagctttccaaagggcaaatctattcatgaaacaacttttctcctcaaccctcatttaaaatccctccgtaggccgagcacggtggctgatgcctgtaatcccagcactttgggagggtgaggtgggcggatcacgaggtcaggagttcaagaccagcctggccaacatagtgaaaccccatctctactaaaaatacaaaaattagccaggcatggtggcacatgcctgtagtcccagctgctcaggaggctgaggcaggagaatcgcttgaactgggaggcagaggttgcagcgagccaagatagcgccactgcactccagctggggcaacagagtgagactttgtctcaaataaaataaaataaaataaaataaaatccctccgtacttcctgatgctttgagagtcaagatctccaatgtgaggctctccatggctggccccatccaccacccatcagtccgcccagctcacacccactctctgatttcctgcatgtcaggctgcctggaatgaccctccctctctcccacctgggcactttctgagacttctctttagaagccttcccttactcttctcaaatttacctagttaacattcatgcatccttcccaccttacctttaatgccccttccccagggaagccttccctgatggccccatgctggtcttggtctgcctttacacacacccctgaagcacctctccccgactgcactttttcatagttgtactcttacattcaattgtatgattagcaccagagggcagacttctggatctccagcaaagtgcctggcatatagtaggtgctcaacacctgagtgaatggcttctgtgagagcaggaaggtgagtgaatggaaattttttccttaaggcttacaggggcagctccgacctagagacatccgttgcaacctttcattctcacacccttcccaaggccgtcacggtccatatctgcaccccagtctgtgcttatcacacaataccaggccctgaatacagctctttagaccagccgtactgtgaagctgacagccctttctgcacctgcagatgtaaccatacctgggcttctccagggatggtctaagcctaggctgagctcgccaggtgcagtgactcacaactgtaatccctgcactttgggaggccgaggtgggtggatcacctgaggttgggagttcgagaccagcctgaccaacatggagaaaccccgtctctactaaaaatacaaaattagccaggtgtggtggcacgcgcctatcatcccagctacttgggaggctgaggcaggagaattgcttgaacccaggaggtggaggttgcagtgagccaagattgcgccatttgcactccagcctgggtgacacagtgagactctgtctcaaaaaaaaaaaaaaaaaaaaaaaaaaaaagactaggctgagctctacacagagactatggctgtgactccccaccaggcctgggctggaattgagattgctccaagtcctccagaagggcccttggaaagacctgtggtcccagcatcctctttagccccccatctcccctctgtgtttgtaaactgtcctactgggtcttttagtggcttccttcttcaggacaagaaaaatgcccttctttcctctctccttcccaaacagcctgacctagggctctgctggaaaggtaaggcccgattcagcaccctccctgttttctccccaggctttaccaccctgcagctgcaactttagccctgggaaacagaggggaagctggtaagtagaagccctgttgggtgttaatagggatgtagagctccaccttcctagataagaggagacagcaggagtcctgctaggttacctacccaggcgaaggccacacaggtgtggtacatgggggaggaggctggcacgaaggtgcggtagcggcagagcatcaccaggctggccaggccattgagaaacgaggccacggccgatgccggctcttgaaagaacaggaaccgggagaagggccactgaaaaaggagcagatgaaggaggtttgaagggcaggcaaccctcaactggcccagtccacctattcttgacatgctgaagcaacaggtcctcagctgagtcctcagctctggagtttggccaaagcctcaggttcagtacctcttcagactaatgagccaccctccagtgcctagttaagagttatacccccatcctggccagcaggcacagcactgtaagccctgatctctgggaagaccagatgggtcagggtagatgactcagtatggcctggtggaaacagcacagagttgccatccagaagacacaggtcccaacccctcctctaccactgaccacggtcctttgagcctcagcttactctgtgaaaaactggggtgaatacttcctgccaacctcaacaggccagaatgagataatactggattgaaacgtaccagcaggccaggcgcggtggctcacgcctgtaatcccagcactttgggaagctgaggcgagagggtcacaaggtcaggagattgagaccatcctggctaacatggtgaaaccccatctctacttaaaaaaaaaaaaaaaaaaatacaaaaaattagctgggtgtggtggcacacacctgtagtcccagctacttgggaggctcaggcatgagaattgcttgaacctgggaggtagaggttgcagtgagccaagatcatgccactgcactccagcctgggcgacagagggagactccatctcaaaaaaaaaaacaaaaaacaaaaaacaaaagaaagaaaggtaccagcaaactgtgcctcgctagacaagctgaagcatattactgtgaatccagacccctactggagaagcaacaggaaacaagccacagtaggtaagggaatttgtccctgcagtaaggtgggcatctcaaccactctaagaggcccagcaccactctctggggagactccaaagccttccagatattgctactccaaatccagaggcaggacacatgggtcctatccaattctatggaaaccagcagattttggggagaacaggtagctgccccaaacacacacgcattaccccatgcctcagactgcttggacagtgtggtccaaccagggggtatattactcctaccacgctactaccatatgcctaccctgaccctccaactcaccttgccatggaactgaggcactttgtgaccttcctggaggtagagcccaacggtgacccacatacactcatacttacagtcgtcccgacaggtccagcctgaaacagacaaatgtggcctggtgaactccccagcacagagaggaaagagagagcatgaatggggtccaagcgcaaatgtaggccaagagggcctgtaagttggagagaaccaggagaaatctcaaaattctagcttcccctttgaatgaatgagagatgatgagatgtacacataggggaaggtgtatgtacgtatgtatgcatattttagtgagcaattagagatattcgtcttttttttgtttgtttttttgagacagttttgtttttgttgcccaggctggagtgcaatggtgcgatctcggttcactgcaacctccgcctcctgggttcaagcgattctcctgcctcaggctcccgagtagctgggattacaggcatgcaccaccacacccaactaattttgtatttttagtagagatggggtttctccatgttggtcagggtggtcttgaactcccaacctcaggttatctgcctgcctctgccacctaaagtgcggggattgcaggcacgagccaccgcacccggcattttttttttttttttttttttgagacagggtctcgctctttcatccaggctggagtgcagtggggagagcatggctcaccacagccttgacctcctgggctcaaacgatcctcccacctcagcctcccaagtagcgagaccacaatgtctggctaattcttttattttttgtagagaaggcatcttgtcatgttgcctaggctagtcttgaactccagggctcagatgatctttctaccttggcagacatttcctctccttttgctcaagtccatcaagatgttggcatctgatgaactcatctatggaaacctgggtttatatttgtccttcctgaatataggatttgctcttactctcctggaaggagttcttgctatcttactcccttcctatgaaaatgaagcccaaattcttcaacctgacttttgaggctccaaattgcctttccaaccgtattggtcactactcctgttcatgtaccctgctccctgagtaaataaagctcctggatgtgcccacatctgcccagggcatccattctctctgttccctctgtctggaatgcaaagtggtataatagtaaagaggacaagcttgtggtcaaacaggccagaactggaaactccactttactacatactggctgtgtgaccttgggcagggcatttaatctctctaatccccatctgtaaaactgggattagagaaactatctcaaagggtgtgataaaaattacttgacatattgtgacacctgtcacacagtgagtgctcaatacgttggttctttgcccactatggtccaaatcgaatgtaccagtccaaagtccctccttcaaacaaaacgttccaagatgatccctgcccccacgtcttcaaagccggaactgacaccttcctatcccaaatgcttcctaatcaaagagtctttcaggggctcaaatcattctctgccttgcacttgaaaaggctcatgtccccgtggggactgtgagtcccaatgggcgggaccctggtctgatttctgtgccattcctagacattgtggcccgaatgtatttaataaatacccttttgactgaacaaataagtaaatgaaagcttctgggaaagtaagagaggctggtaaggctctcatcaccttaggggcttcactcacattcataagagacctcgtggggaaactaaggttcagggattgcagaggcgtattgggggcgcagggggcgggagcaagacaaatgggcggggcttaccgtgggggtggggcttacctgctagactcatgtagattggctggcgggagcggaagtgattcagagcgcccccagagcagttctgctcttcgcactgcagtacgcagtcgcggtacaccggctcacggtcgccctgggagccgctcgccagcgccgctgccccagctagcaggaccaaccgcgccgccaggccggccatcctttctccctggctcgccgccgggggaggagcttaggagtatgaagcttccacttccggagtaaccggaagttcctgtgttctttattctactctccgctgaagtccacacagtttaaattaaagttcccggatttttgtgggcgcctgccccgcccctcgtccccctgctgtgtccatatatcgaggcgatagggttaagggaaggcggacgcctgatgggttaatgagcaaactgaagtgttttccatgatcttttttgaggtagggctgtttactgtcaccacccctgtcggattttacttcctaaacgtacctgtaactatccacttctctccatctcttctggcaccaccctggttaaagacaccatcatgtgtcgccaagacagccgcagtagcttcttaatggctctccctgcctctacttttgcctcttccaacctgcgctccattttgaaaaattaaaatttgcccatatcactttttttttcttaaaattatttactggctcccaattaccttgggtaaaatacagtctccacaaaccctgcctgatttggcccctgtccactggtctccctcactcccttgctccagacccgcttcagagggctatgtccctcaagcttcctgactgcctggcctggtctgaatcactcactcttcttttttcttctagtcgcaattgaagtaccacctcccgagggtgattgcttccccatgcggggtagaacctttgctgtcctgttcaccactctacctccagcacagaatttggcttatggtaggcgctaactgcgtttgtttgttcttctgtttaatgaatgaacagcatacatcaacataagaacttgacaaatccagggctgtaaaatcatcagtatggttctgcactgagatcggagagaagtaatatttctaggaaaattaggaaccctgggaacaggacgcttgctttagtatcctctccctgctcacctcccctgcactcccatcagcaccgacccacacccaatctcatagaagccttgtagctaaggatcaccctttctcctcccccactctcctcaccccttgtcaacttttctttttcgtcctgggggttggaatgagtaagaagtagcctgggattccattcactcacttaacaaacatttctgagtccttagctctagcaccttgctaagcaaggcaaaatctccaggaggcaccattcacattgcattttctgtgaatggtgctctggggagcagcattcacattgccttttctgtgaatggcaaattcttccagttaaatataacatgaatagtgtcccctggagttgaccacccaactgatactgactgagaagctgaaatgaacaaaacaaccccttagccctccaggagctgaccggaaatccagtgctaatactactttgcatcttacagattagttcttttacaatactgtttttttttcttttttcatttcattttgtcctttctgtgactctgggatgagtctttttatgaggatcctcatataaagatggacatttaggattaaagaggatgaaatcctgacaaaatagggagtctcccctttagaaaattcctaagtaaggctgggggtggtggctcacgcctgtaatcccagcactttgggaggccgaggcggacggatcacctgaggttaggagtttgagaccagcctgaccaacatggagaaaccccatctctactaaaaatacaaaattagttgggtgtggtggtgcatgcctgtaatcccagctactcaggaggctgaggcaggagaatcgcttgaacccagggaggcagaggttgtggtgagccaagattgcgccatcgcactccagcctgggcaacaagagcgaaactcaaaaaaaaaaaaaaaaagaaaaagaaaattccaattttgaaggcctcatcctatattatgtcaaacatactgaaatgcagtaacgccccacattaaataagatttataaataactatacatatatataattcaatctaattgctgttaatagttgacatattgctacatttatatacatttagttaaaaaaaattttttttcccagacagcctctcactctttcacctagactgaagtgcagtggcatgatcacgactcactgcaacctcaacctcccagactcaagtgatccttccatctcagcctcctgagtagctgggactgcagcatgcgccactatgccctgctaatttttttaattttttgtagagacacggtcttgctatgttgcctagactggtctccaattcctgggctcgagtgatcctcccgcctcaacctcccaaagtgctgggattacgggcgtgagccatgccacacggccataaaatattaattttcgcagctttcttatattttagaactaacaatggaaatttgttcgggtctaaagtatttcagaggtccttgaaaacccatgcctacatacctgatggaaaaagcaatcctaggttaatggtggaagtgggagtagagacttctgttctgttgacttcttggaagatggggtactgtctctctgggacagctcttgagaatttccctgccagcacagccccagataacaatctctagatggcgattacctggcctctcttcccaactttctagcctggagcccctagttctcccctgagcctccttagcttgtccttcttcctaacttgtatttggcttcagatgtgatccacagtctgaaaagtcactaattcattccttcaactcaggcttattgagtcctcctgtgtatcagccattgtactcatgggggaaaaaaaagacaaagcatatgttaatagtagagtgtgctggacaggcacagtggctcatgcctgtaatcccagcactttgggagggcgaggcaggtggatcatctgaggtcaggagttcgagaccagcctgacctaacatggagaaactcctgagatcgtgccattgcactccagcctgggcaacaagagcaaaactccgtttcaaaaaaaaaaaaaaaagtatagtgtgctaaaggctcaacggcaagctgaccatgttcttagatcaaaattggtagagagtctacaatgtgggttccttattcatcaaatgtttattaagtttaccatgtgcaagtctctgggaacagagtgatgaacaaggcactgtacttttcatggtcagaggagggaaacaggccataaacaagtgtcaaacaaaagactgaagccaggtgcggtggctcacatctgtaatcccagcactgtgggaggccaaggcaggcggatcatgagatcaggagatcgagaccatcctagccaacatggtgaaaccccatctctactaaaaatacaaaaaaattagctgggcatggtggcacgtgcctgtaatcccagctactccggaagctgaggcaggagaattgcttgaaccagggagttggaggttgcagtgagcctggattatgccactgcactccagcctggtgacagagcgagactccatctacattaaaaaaaaaaatatatatatatatatatacacacacacacacacacacacacacataccctctaacccaggaatttcactcctaggtatacctacataagctccagtatacctaaacaagtgcaaatttgtttaagtacagttatttgtggtagcattagtcattgttttcaatagcaagaagaaaaaggaaacaactaaatgtccatcaatagggaatgaattatattaatggagggagagccatacaatggaaggctgaacagaaattaataggaatggggcagatttgtaatgtactagcatggtaaaaccttcatgatagatatagatatagatatagatatagatatagatatatatacatatacatatacatatacatatacatatatatatatatatatatatatctcttgtgtctcagcctcccgagtagctgggattacaggtgtgtgccaccacatccggctaatttttgtattttttagtagagacagggcttcaccatgttggtaaggctgtcttgaactcccgacctcaggtgatccacctgtctcagcctcccaaagtgctgggattataggcatgagccatcacacctggccaaatatttttgataagtatcaagtgcacagtgcagaacaaaatatgtgtgtgtgtatgcatgtgtatgtacacctatacacttatatacagtaccccatgtgaagaaaaataagggtacgtgttatgcgcgtagtattatggttgttatttttgagaatatatctagaaagataaaaaagaaagtggaaatagttcttgcctctggtgggaagtgggactatgtgcctgatcaatagggaagtaaggaacactttttttttttttttttaaacggagtttttgctcttgttacccaggttggagtgcaatggcgcgatcttagctcactgcaacctctgcctcccaggttcaagcgattctgctgcctcagcctcctgagtagctgggattataggcatgcgcctccacgcctggctaattttgtatttttagtaaagatggggtttctccatgttggtcaggctggtcttgaactccccacctcaggtgatccgtccgcctcagcctcccaaagtgctaggattacaggcgtgagccaccgtgcctggccaggaacgctttttatttttgtacctttaaaagtgtgtaccgtctgtgtatataatcagttaaaaacaaagaaaagctgagtgtggtggctcatgcctgtaatcccagcccttaaggaggccgaggccggcggcagatcacctgaggtcaggagttcaagaccggcctgaccaaaacggtgaaaactcatctctacaaaaacataaaaattagccaggcatgatggcaagtgcctgtaatcccagctggttgggaggctgaggtgggagacttgcttgaacctaggaggcagagattgcagtgagccaagactgtaccactgcactccagcctgggcaacagagcaagtctctgtctcaaaacaaaaacaaaaacacaaagaaaaaatgtaaaacaatttcatgcagtagcaagcatcgagttaaatacagttgacccttgaacaacacaggtttgaattgcacgggtccatttatactcacatttcttccacctctgccacccccaaaatagcaagaccaaccccatctcttttcctttctcttccccctcctcagcctactcaatgtgaagatgatgaggatgaaaacctttgtgatgatccacttccacttaatgaatggtaaatatgttttttcttacttatgattttcttagtagcattttcttttctctagcttcctttattgtaaaaatacagtatataacacatatcacatacaaaatgtgtgtaaatggactgtttgctattgataagtattctggtaaacagtagactattagttttttttgttttgtgacaaggtctccctctgtcgcccagcctggaatgccgtggtgtgatcatggctcactgcagccaaaaacttctgggctaaagcaatcctctactaaaaatacaaaaattagccaggcatggtggtgcgcttctgtaatcccagctactcaggaggctgaggcaggagaattgcttgaacccgggaggcagaggttgcagtgagctgagattgcaccgttgcattccagcctggacaacagagcgagactccatctcgaaaataaaataataataataataataataataataataataataatagggctgggtgtggtggctcatgcctgtaatcccagcactttgggaggccaaggtggacagatcacctgaggtcaggagtctcaattaaaaaataaataggccgggcacagtggctcatgcccataatcccagcactttgggaggccgaggtgggcagatcacctgaggtcaggagtttgagaccagcctggccaacacggagaaacgctgcctctatcaaaaatacaaaaattagctggatgtggtggtgcatgctataatcccagtaataccagctactcggaaggctgaggcaggagaatcactcgaatccgggacacggaggttgcagtgagccgacatcatgccactgcgctccagcctgggtgacagtgagactctgtctcagaaaaaaaaaaaaaaaaaaaaaaaaaaaaaaaaaatatatatatatatatatatatatatatatatatatatatatgtgtgtatatatatatatatacacatatatatgtgtatatatatatacacacacacatatatatgtgtatatataaaataaaataaataataataaaacatttactttggctgctgttgctgcggggagaattgcagggtgtcaaaagtagcactggtggaggggtagtgatcaaagtctggtgctttagcccaaaggagaaatgatagagactcagactagctggtgatggaggtagaataagcataaatgtatcaaaaagaggagttgatagatcttaaagaatgattggatttgaagggcaaaggaagagaagaatcaaccaggtgggttcagtgaatgaaaccatcagaaacgaattgtcccctgaaatcaagactttgtgattgccatagttgtatgcttctcaaaggttcctcgtctcctcttccttggaccaaaagtcagaggcaagaatgccctcattcataccccagtggtctatacctccagcagcaagtcgagtgagcaagtgatgtcctgaaaggcccagtggatcagtggaatgaagcgggcaggaagacttagtgctcctgaaacaaggaatccagaatccaggagaaggatggctcagtggggctttcaagggacaagtatgggggttgaaggggtcactgtccctataccaaatccgaaaatattgtgaccaggaaccattctgtccaactcttctatttcaggtggcaaagcaaagctatattcaagaccacatgcaaagctactccctgagcaaagagtcacagataaaacgggggcaccagtagaatggccaggacaaacgcagtgcagcacagagactcagaccctggcagccatgcctgcgcaggcagtgatgagagtgacatgtactgttgtggacatgcacaaaagtgaggtgagtcgcaggacagaagagtgctttttgtttcagcagagcagcctggggagagataaaagctactcctggggcctgggcctgcattcctgagatgtgggtaagaggggcccagggtcagagtgtctggcaagcttggctctgcccctttgctgtcctggagactagggctaatcctgggctcagggagtggcctccccatggttaggatacaagtgctcatcaagggccacccctaggaaggaccaattttcctatcagaagcttctaagttatcctcctttggcccaaagggacacctcaagcctactctgaggaactctttccaatgaactaattcctacagtcacttccccagcaacctgtgcctcagcctcaaggcactgtggggtaggcctcagtttgtggcctggacatcggactgtggaccagacgactcctcccgatttctgtttgttttcagtcctctgaccccaagctggctggtgaagtaggtagagggaggagactttggtgcatgcatacacacacacacacacacacacacacacacacacacacacacacacacacacacgtctcctgtgccccccagtctccatggctggtcaatgattgactggcatttcacaggccgctggttgcagccccagcctgttgacttagaggtcaccctcggaagctagagccctgtcctgcctcttcagtgtcagtggtcactccactgcccacaggctggggtcttgggcaaaacacacgcatctgccctgatctgagtttgctgccctctgtcccgcagtcagccccactctgttcccactccctctccccagccccctagctagacccctctcaccagcacccctttcccttccctgagggtccccctcgctgtctttgtccctcagacatcctctttcctgggctctcctgccaggccctgctggagggacagttaaggaggaaatcgaatcagcagcgcccacccctgccccccttcctctcctcttgtcagacaccagacgaggttttttcctctggcttcccagctctgaatgggctcattctttttcagaggctcggcccctctcgagcctcctccccagggcgtgagttctgaccccagctcctccccccatccccactccagccccctctccagcttgctccaccctctctaccgcccaccgggactgggcattgtctgccagtccgggtttcttcctgggatttgggatgcagagaggatgggtttgcttgggcgggggggtggagagtgaaggggggaagcaggatctttgtagagggagggacctacagttacctggacttctttcctctgtctcccctcttggtacccttgactggggctcttgagggtaatgggtgaagccaaatctgccatggctcagttcccagctcagctctgtgaccttgggaaagttcctttagctcgtggaatctcaaggctcaaggttcctcttctgcaaaatggggaatgataacacctgcctcctctggagtcttggggactcagtgttctgaggaacgtggctgtaggtcagagtggcacagagtagggtccaatgaagcatggcgtccacagtagctttcctgactggactaacctttccggacacaacagcagggcaggggtggggcctggggagaaaggacacctctaaccctgatcctaacatcccgatggcctctaaggctgcctgcacactcatccaggtgcaagccctccaaggtgtggtgtgatgaaccagtgactcctggagccaggtcagcgcatcctcttcccgcagggctgtaagctgcaggactgagaggcaggttgaccaggtcctgggctggatgatggggtgagagtaaggggtcagttttgatacatgcccaacttttctctctagccctaagacatcctgggcaaattgcttacctcagttcccctgatcctcaccctaaccctaacaccagctcaagagaaaatagggatattgatggccatccagaagggctgctgtgttccatacacagcaatatttctcgaatgtttgtgacagcggtccaaggaataagttaattttacattatcactctggatacctgtacaaaactccaccttatccttactatatgaatgtgctagggttgtttttttgttttgttttttttttttttttttgagacagagtttcgctcttgttgcccaggctggagtacaatggcgcgatcttggctcaccgcaacctccgcttcccaggttcaagcgattcacctgcctcagccttcccgagtagctgggattacaggcatgcgccaccatgcccggctaattttgtgtttttagtagagacagggtttctccatgttggtcaggctggtaccaaactcccgacctcaggtgatccacctgccttggcctcccaaagtgctgcaattacaggcatgagccaccgcacccagccgtgctagggtctttttctgttcaattcctttctctctcttgctctctttctttctttcaatggagtcttactctgtcacccaggctggagtgcagtggcaagatctcagctcactgcaacctctgccctctgagttcaagcaattctcctgcctcagcctcccgagtagctgggattacaggtgcctgccaccacacctagttaatttttgtacttttagtagagatggggttttgtcatgttggccaggctggtctcgaactcctgacctcgtgatctgcctgtcttggcctcccaaagtgctgggattacaggcatgagccgccatactcggccaactttgtattactttcttaaagagagtttcccaaattatataagcttcaggccccacaaaacctagatctgccccagtataactaaatctgggaccatttattgagcaattattatgtgccaagtattgcgctgagtgcttccagagcattatctcctttaaccccagcatagtatgtcagatgctgttttacagatgagccaactgagaccagagatgctcagtcacttgcccaaggtgacatgactgatatggaatagagtcaagatttttttttttttttttgacacggagtctcactctgtctcccaggctggagtgcagaggcgcaatctcagctcactgcaagctctgcctcccaggttcacgccattctcctgcctcagcctcctgagtagctgggactacaggcacccgccaccacacctggctaattttttgtatttttagcagagacagggtttcaccgtgttagccaggatggtctcgatctcctgacctcgtgatctgcctgcctcggcctcccaaagtgctggaattacaggtgtgagccaccgcgactggccagattcaagatttgaacccaggtcctcttggtcccagaggcccctgtttctcaactccctaggatggcatagcaacctgtcccacaagaggtgcctgctttaagtgtgctcagcacatggaagcaagtttagaaatgcaagtgtatacctgtaaagaggtgtgggagatgggggggagggaagagagaaagagatgctggtgtccttcattctccagtccctgataggtgcctttgatcccttcttgaccagtatagctgcattcttggctggggcattccaactagaactgccaaatttagcacataaaaataaggaggcccagttaaatttgaatttcagataaacaatgaataatttgttagtataaatatgtcccatgcaatatcttgttgaaattaaaaaaaaaaaaaaaagtcttccttccatccccacccctaccactaggcctaaggaatagggtcaggggctccaaatagaatgtggttgagaagtggaattaagcaggctaatagaaggcaaggggcaaagaagaaaccttgaatgcattgggtgctgggtgcctccttaaataagcaagaagggtgcattttgaagaattgagatagaagtctttttgggctgggtgcagttgctcgtggttgtaattccagcactttgggaggctgaggcgggaggatcacctgaggttgggagttcaagaccagcctcaccaacgtggagaaaccctgtctttactaaaaatacaaaaaattagctggtcatggtggcacatgcctgtaatcccagctgctcgggaggctgaggcaggagaatcacttgaaccagggaggcagaggttgtggtgagcagagatcgcgccattgctctccagcctgggcaacaagagcaaaagttcgtttaaaaaaaaaaaaaagtcctttcgatgtgactgtctcctcccaaatttgtagaccctcttaagatcatgcttttcagatacttcaaagattccagaagatatgccccgggggtcctggaagccacaaggtaaacacaacacatccccctccttgactatcaattttactagaggatgtggtgggaaaaccattatttgatattaaaacaaataggcttgggatggagtaggatgcaagctccccaggaaagtttaagataaaacctgagacttaaaagggtgttaagagtggcagcctagggaatttatcccggactccgggggagggggcagagtcaccagcctctgcatttagggattctccgaggaaaagtgtgagaacggctgcaggcaacccaggcgtcccggcgctaggagggacgcacccaggcctgcgcgaagagagggagaaagtgaagctgggagttgccactcccagacttgttggaatgcagttggagggggcgagctgggagcgcgcttgctcccaatcacaggagaaggaggaggtggaggaggagggctgcttgaggaagtataagaatgaagttgtgaagctgagattcccctccattgggaccggagaaaccaggggagccccccgggcagccgcgcgccccttcccacggggccctttactgcgccgcgcgcccggcccccacccctcgcagcaccccgcgccccgcgccctcccagccgggtccagccggagccatggggccggagccgcagtgagcaccatggagctggcggccttgtgccgctgggggctcctcctcgccctcttgccccccggagccgcgagcacccaaggtgggtctggtgtggggaggggacggagcagcggcgggaccctgccctgtggatgccccgccgaggtcccgcggccggcggggccagaggggcccggacgagctctcctatcccgaagttgtggacagtcgagacgctcagggcagccgggccctggggccctcgggcgggagggggcagttacacggcagcggctcgagatggcccatccaagagactggcgctttccaggctccgaggggctccgggaacttgtcaaagaagttctctgaaattgttcagaaagttttcccgcaaagggtgtattgcgtagagcgcgcgcgcgcgtttccccccttcttgagccccctcaagctttctcaaagcctttccagttggcagcctccgcctccggactggcctgggctggattccttgggggggtcctctgccctgcccctcctccagcccctccccgctccccttcagacgattttggtttggttgctcctgcttctggcggggtcgggtgtgtgtgtgtgtggtggagtggagggtggcatagcaacctgtcccaaccagagccggggaggaaagggtggcccggagggtggcctcttgctggggtctgggttgggggcgggggagacgtttgctttgaacagattcttggggccagcttagggactgtgctctgtgacttttggagcgcgtggaccatggaggggtgggggtgggtttcttggggtgtaaagtgggagagttcccagagaaggaagctaagaaataaggccagatgggagcctagggagggctgcgttgttctgctgccttttccttggtgctgtgcgtggggaagggtgagtgggggcagtgtgtatcctgacccatctgtccacctgtgtgcattaatcataaaagctaacatatagcctgggccaggtatactctgccaggaactgtttgtggtgttttgcatgcattctcctttaatcctagaacacccctatagtggaagttctgccagcattctggactgagtagcagtccagaggttgagtagcagctagtaagtggtggggtcaagatgggaccccaggcagtgcgacccccaaccatgcattcgaaatcgctatatggatgagtgcacctggagcaatgagggacactgctccctgagtcactgggctgcaggggagacaaaatgaaagtgttctgggagtcgtgggtggtctccataggtcagagggtctggggagggagtgggtgtcatcgtggctgtgtgttgcccgaggggccctctgtgagtgagtgcatggccgtgttatctctgcaggtctacgccagggtgttcctcagttgtgtggtctttgtatttgtgtgtctgggctttgtgttgccaaacagcagtctctctgctgacttggggacacaggctgaactctgtcctctgcaggaactcccttaaggtgctgggccagatctgccataaacagagggaggtagccttctatggccacgccttcttgctgaggaagaaggttcctctcttccagggagtacatccttgccctccctgtttcccagacaagcatcttcacctctcatcttctgatgagaagggtgaggccatactgagctgtcaggctgagctgctgcccttcctcaccttgggctgggagttgatcagggaatggcagttgctgcagagctggatttgagggctgggttctctggatggggcctcctcatgtcctcacccctcaacctgcactattgattgtgttgtgcaggagttagttaaaaagtcattgcacagcctgggcaacaaggcaaaactctgtacaaaaaatacaaaaattagttggatgtgattacacgtgcctgtagtcccagctactccggaggctgaggcaggaggatcacctgagcccaggaagttgaggcttgcagtgagctgtgattgcaaatgctctccagcctgggtgacagtgtgagactccgtttcagaaaaaaagtataccacccagctgcctccagcacccagattttacccaaggggtgaggtctggggcaggaatgtgggggaaggggaggcctagggggagccccagaggggtcaggatttttctgaaatcctttcttagaggtatgggttttacaaattgcagcaaatacatccttttaatcttgcagaactccttcatattttaattccagtatgattcttccaacagcctcctctctttactatacttggggaaagtactcattttatttgtcaagaaaaaaacaattgaaaagatagggatcaaatgtaaaaagaaaaaatacgtggcattccaaagtcaaacacaaagcatgtttaattttctcgtggtttgggattacccatattcctgctgtatgaacctgtcttgtcttaacttttaagaaatgtacggtgtacttcctatatgctaggtttttatccatgctttcatttaatctctgtgacagtcctgtgaagtaggtgcacagatgagaaaatggaagttcagagaaatgaagcaacttatccaaggctcccagctacccagtaatgtccagggaatttttggactctgaagaggaggcattaagaggtggttagagtcttattccagccaacaataatgggttgaacaaagccttaggggcaggcaggtggccagatgggaggagaagcgctcctcttgttcaggcgaatgacctttccatccacttctctaggctgtagaaagtggagctgagctgggggccctgaggttccctcttgacttcagagtcctctcccttcctgtccagccaatgcctgtcttccttttgggccctaccagcatgacagggggctgcgggcaggaggggacagaggccacgttgacacacagggctgtgggtgagagagacagctgaagtgtcagcgtgaggggccagtgtggggctgcggctgggagggctggggtggggcccagggtagttgtgcctgtccttgggtgatggaatgatctggaaagagattccttccctgccctccacctgtgagaagcccctctagagtgacatctccatcttatgtttggccacccatcctccccctgggaagagagccgaggtggggtaagggatgtgtactctttcaaggagtgggagaattattctagcgaatgtttgtgttgtcccagttctgtttacaaagcctcgtcatgtttacagatggctgcgcaattcattacctcatttaactctcatgtacctcctctgagggagtaagagctgttacagccaagtttaggtcagtaaatattcaccaagttgcaggtactgcagggcatagagatgaatccgatttagcttctgccctggaggtctgggaacttgctcaagatcactcagtgagcagctgagctagggttctcaactaaagaccctgggcccaggccctggtctgatgtcaggcctgatacaccaggtgtttgtggtcggggaatcccagtgtcacttgaatgggctgtgacattatgggtctgggagagctgagctttggggacacaggtcattttactgtagtattcatggaaaccaagggaagtattggcttttctgctgtgagcaagaggagcagctggggctgcaagctggtggggaggagagaacccacctgagagaaacctcaggactggggtcaagtcctgaccaccagagtccagagagacatgaaggactgtgaccagctctgagcagagagatggattccatgacctcaactggtcccttttgttcggagactcgtgactggacttcattcatccactcattcattcattcactcagcagacacttatctagcgctccctgtggctggtcctgcctcatactgtctttgctctggagaattggaggttggggttcctgaggggcagggtcctggagacaaggacactcctgggtagaattaggacctaccccccaggaaatcaacggggaccaggtgccgtggctcacacctgtaatcccagcactttgggaggccgagacgggcggatcacaaggtcagcagttcaggaccagcctggccaacatggtgaaacccgcctcaactaaaaatacaaaaattagccaggtgtggtgtcaggcacccgtaatcccagctactgaggaggctgaggcaggagaattgcttgaacccgggaggcagaggttgcagtgagccgagattgcgccactgcactccagcctggcgacagggcgagactccatctcaaaaaaagaaaaccaatgggacagggcagatatggggacaatggtaaggagatgggagagtgggagggaggtgtcaggaagaccttcttgacttcatgtaggctggtgggggtgttagccagcaagcctccagttccctgggaaccgttctcagggtaccaattttaccacctgtctgcaaacactttaagattcttaatcagactcaaattggccacaaatcaggtaaacaaactcactagtggggtggggctaccacccgttctgaccctccagcccaacccagcccagccaccctgccctccgtagagcctgtggtgtttatcggtggcattgggagaattagtgtgtatttatgttggcgtggggtgtggggtggatttgtgtgtgtgcagttaggcctagtggaaggaatgtgggatctgaaggcaggccagcctgagttccagtcctgcctgttgctcacaagctttatgaggcgagagctaacccctgccagcctcagttgtcttctttgcaagatggaggttgcagccccagtctctggagcatgttatgcagatccaccgagagtgcctgccaggcacacagtaggtgctcagctcagttactgtggcggcccccactccccattgttgttgttttcctattgcctggcggccacagctggtatcccttgaaaagggctacagggggtggagtcggaccctgccccagccctgtggagaccctgggcttgggccagggcctggggtctgggcctgcagacagctgtgtctataaagcagctgaagggctgaggccgggggaggtcctggcagcagggcgttattttgggcctggcctgccacccccagctcctgtttctcttgggagtctgttgggggaggaagtgtggggaagaggagggggtgcaagtgggtgaggcatggagtggggaggcctccctcagggacatggacccttgagttctatttctgttcctccctcctgttcctccctctttgtccttatctgcctagagaggtgggaatagaggccattctgagtatcactaggagaccaccagtttgtggccactggccactggcccaggcagggaacctgggggcttgccctaccagcctctcccagcaatctgaaggcagggggtacctcgtattaccccctaggatttgaccttaggctccaacttgctgggagagcagtgcctctggtgtcagaccccaagccagcccttgtgctgtccctgaatctgcatgtagcctgtgggaggcggagcagtgaccggcaggaattctgggcagctcaggcacctgtgggcctgagggtgccctctgcccccacccttccgatctcctgggcaagacacgccaggtgattcatctcaccagagcagaaaaacaagttcaactgggcactttaatctcccctcactggcaggcctggtgtgagctgctaccccggcgcccctcaccaggggtgctttacctcctctagtattcctgaccttagtgggcatttctggtctcagggataccaggctggggtccaagtgggccaggtgtggcagttcagccctatgccccatggctgatggctcgcgctgggcaggtatgcagggctgacgtagtgcctttgtggcagcagtttcgtggcacacattctgccagctggttctggagtcttgccctgaggaggtggccagggtgagggtgccagcgcaggaacctttggcgcatgcttcaccctggcctgggatctgcagcctgggtccagatgcccacaactggaatctgacgctccttttctcttcatgggggactcccagaggtctctgcaatgaccagagccccggttgtcccatgcctcagctgcaactccagctgaccctccttccccactctctgggtggcattacgggggtgtggatcccttgccaagaggttggcatgtgggtgtgctggaatggcatagggagaatgcaccgagtttgtttgcttgggagaggggcagggggtatccagaagattcatgattcgtcatcgcctctcttgggggatttttacccctttgccctgagttgtgcctttgggacaaaggaagcctttctttgccagccaacaccctgtactggcgggcgagctccccagggctggcacgctggggcagcctctgaatgcacagggtgggcctagtcagaagaagcctttcccctgaaatccctctacttcccaagcacgcaagctttctcctgctgttaaacctgcagtgtgcaagggacatgggcggaggggtccttcagtcaggcttctccctgtctgaggtggcatgacttggagtgagtttggatggggtggccaggtctgagaaggtcccccgccagtgtcctctgacccatctgctctctcctgccagtgtgcaccggcacagacatgaagctgcggctccctgccagtcccgagacccacctggacatgctccgccacctctaccagggctgccaggtggtgcagggaaacctggaactcacctacctgcccaccaatgccagcctgtccttcctgcaggtgaggcccgtgggcaacccagccaggccctgcctccagctgggctgagccctctgtttacaggtgggtggcagaagaaggtgccctgcccttctgtttcctctcttgttgtggtttctcaaccaggaagtcctttctaacatctaacccccattcattttactgcagaatcagttgactctctctataacgtggctggccgaggtcatgtctggatgggatgcgtctgtgtttccgctaaatcttgtgctctcttgccagcatgatcatgtcccctgtccacctgctccagccactatccctctcccacttacagcagaagaaagggctggtgagaaaggtggattacaggcccacttctgccactgacgagccctatgaatgtggcctacacccccttagcttcactgggtctcagtttccctatctgtatattgggagcagttgtgaagctcagaagagaaatgtctgtgaaaaggttatgaacaggagggagagtggaaaccaacctgctggatcgtgtccacagaccctggaatggggccacatgcttggtttgtcaaattgcagacgccggccgggtgcgatggctcatgcctgtaatcccagcactttgggaggccgaggcggacagatcacttgaggtcgggagttcgagaccagcctgaccaacatggagaaaccccgtctctactgaaaatacaaaattagccaggcatggtggcacatgcctataatcccagctacttgggaaggctgaggcaggagaatcacttgaacctgggagacggaggttgtggtgagcctagatcgtgccattgtactccagcctgggcaacaagagtgaaactccgtctcaaaaaaaaaaaatttgcagacgccatcccatccaggcctttgctttcactgatgaagaaactgagatacagagagggcagggcacctgttcggagtttatgaaatgcccccccaccattatctttcttgatcatataagaatctggtgaggcaaggtagggcgtgatctttatctctattttatcgttttatttaagcgggaacaggactgctcagtggctgggggccttgcccaagatctccaagtactggggaaccccagggaggccctggggggtggcagtgttcctatttcagccccactctgcttccccctcccaggatatccaggaggtgcagggctacgtgctcatcgctcacaaccaagtgaggcaggtcccactgcagaggctgcggattgtgcgaggcacccagctctttgaggacaactatgccctggccgtgctagacaatggagacccgctgaacaataccacccctgtcacaggggcctccccaggaggcctgcgggagctgcagcttcgaagcctcacaggtggccttcaccgtcattgaaaccttctcttggttattcagagctgaccagggccactgctaaccagggggaggctttgtgtgcattagaaatggtgtcccttctgggcagacgcaggcagagcccgggaagacgccctcagaagattggaaaaagattccccttcttcctgggaagttgtagcttgcgtcagcacatataattcaatcgtgagaatgcaggctgggtttttgcccccacttggctgagtgaagtgtacagtgaacaacctatgtaactatttgctggccctggagccgactctgccccagagtctgggtgccaggtgctttgcccgcatggcccatttcagtcacgctgcagtcctgtcaggaaaaaatcagtgttattctcattctacatatgagaaaactgaggcttgcagatataagggccaaaagttacacagctagtgagtgatggggctgagtttcagactccacagtctcttaaccaccaagcagcatgcccagagtagaggtgagaaggaaggagagagctgcggtccacatgagcatctggacctagcatggacaactcactcctccctggctctcgctttgttcttgttgcgggtgtggtggtggtgggactcaaagacggtaaagatagctttctctcctccctggggaatctgggggttgtttaaaaggcctgctcctcttttagaaggcaggagggccccaagggaagcagaaggtgacagaaggggaaagggtcctctgatcattgctcaccccacagagatcttgaaaggaggggtcttgatccagcggaacccccagctctgctaccaggacacgattttgtggaaggacatcttccacaagaacaaccagctggctctcacactgatagacaccaaccgctctcgggcctgtaagccatgcccctccctgctgcctcttctctcagacagcctgaccccagccgcaaactcccaacttacaacccagtgcctgcccgccactgccccagccgcctacaccacccatttcctccctctctgtccctcctgccatctccctgtgcctcttcatctctggggttctctgtcttgtctccctctgcttataggttgtgcctctggtttgggggcctctcagcctgtctgggtccctcccttgctgtgcagttggcctcgtggcctctgctgctgtttgtgcctctctctgttactaacccgtcctctcgctgttagacatctctctcactgcctgtctctggttctgtcctcaggccacccctgttctccgatgtgtaagggctcccgctgctggggagagagttctgaggattgtcagagccgtgagtctcagggaggcctggagtcagggaaggggagggctggggccgggtggaatgcaggtgtcatacaggtgacatgggaggggtgggataacaggcttgggatgtctcccctgggccaggtagtctccctagaaggtgatgctgatgagggtctggtgcccagggcgccactcagccctcatcctgccctttgcccaacagtgacgcgcactgtctgtgccggtggctgtgcccgctgcaaggggccactgcccactgactgctgccatgagcagtgtgctgccggctgcacgggccccaagcactctgactgcctggtatgtgcctctgctttgtgcccaatgtgctctaccccccaggatgcaaggggtgggcaccctgcctggtactgccctattgcccctggcacaccagggcaaaacagcacagtgaaagccagccacctgtccccccaggcctgcctccacttcaaccacagtggcatctgtgagctgcactgcccagccctggtcacctacaacacagacacgtttgagtccatgcccaatcccgagggccggtatacattcggcgccagctgtgtgactgcctgtccctgtgagtgccagggagaaacacagttttctcattttggtggggaggtttgtttctgtaaatgggagcatatggggagcactgtctgcatcttgctttgagagctggtcatgacagttcctgccgagctgccttgttctttcaacagctgtggagcaggtggcagtaaggagaggcagctaagagcccagacttgggagccagactgcctgggtttgaaacccagctctatcaattagtaggcacgtgaccctcttgctgtgcctcagtttcctcatcagtaaaatgggggcaagaatagtcccaactgcataagatggttataacatttgaaagagttaatatttgtaaagctcttagaacggtgcctggtatgtactaagtgctcctaaatgttagcttttattctatagcctggtgaggtcagttttacctttcgttttgtttttgagaccgaatttagttagctctatcgcagtggcgcgatctcggctcactgcaacctccgcctcccaggttcgtgctattctcgtgtctcagcctcctgagtagctgggattacaggcgcccaccaccatgcctcgctaaattttgtatttttagtagagacagggtttcaccacgttggccagactggtctcgaactcctgacttcaggcgatccacctgcctcggcctctgaaagtgctgggattacaggcgtgagccactgcacccggacttttttttttttggcagagtctcgctccattgcccaggctggagtgcagtggtgcaattttggctcactgcaacctctgccttccgcattcaagcaattcttgtgcctcagactcttgagtaggtggaactacaggcatgcaccaccatggctgggtaatttttgtatttttagtagagacggagtttcactatgttggccaagctggtctcgaactcctgacctcaagtgatccacccgccttggtctcccaaagtgctgggattacaggcatgagccatcgtgcctggcctagctcagttttatttaacagatcacctatttactgatgggcgtttatggactgggctcagacctggggaacctctttcctcctctcacaggaacaggagtgggccttcagatcctggctgactgtgttagggagaggacaaaatgtagagccagaccatttgggttcaaatcctcgctcctccactcactagcacaatgaccttgaataatttacagaactctctgctttggtctccctttttgcaaaatgggaatctcacagtgctgatcccgtctggttgttgtgaggggtaaatggatgtcaggtgctgatgcgtggtagggcatttaagtattggttgatattattcttcttgtgcctgggcacggtaatgctgctcatggtggtgcacgaagggccagggtatgtggctacatgttcctgatctccttagacaactacctttctacggacgtgggatcctgcaccctcgtctgccccctgcacaaccaagaggtgacagcagaggatggaacacagcggtgtgagaagtgcagcaagccctgtgcccgaggtacccactcactgcccccgaggccagctgcagttcctgtccctctgcgcatgcagcctggcccagcccaccctgtcctatccttcctcagaccctcttgggacctagtctctgccttctactctctacccctggcccccctcagccctacaagtgtccctatatcccctgtcagtgtggggaggggcccggaccctgatgctcatgtggctgttgacctgtcccggtatgaaggctgagacggccccttccccacccacccccacctcctcagtgtgctatggtctgggcatggagcacttgcgagaggtgagggcagttaccagtgccaatatccaggagtttgctggctgcaagaagatctttgggagcctggcatttctgccggagagctttgatgggtaagagtgggcacgatgacctgagacagtgtcagggcagacagagtcctgaggatccagatgtggcagcatctcttggggatggcaggagacagaagtggggggatcaagaatgcaaagaaagcagatgggagaccagaggagcagggcctttggtgggtgggggtgattatttttgtaaatgacatgctatccgtgaacaaggacttgtatggaggtcagaccatctagataaagtaaaattccctttgagttcatagcagctttattcaaaatatccccaaattggaaataactcaaatgtgcatcactaggtgaaggaataaacaagtggcagtgtatccatttggtgaagttctacttagcaaccaaaggaaatgaactaccgatacaacataaatgaatctcagaaacattacattgagcaaaagaagccagagacaagattccatactgtctgatcccctttatgtgaggctctgaaccgaaaaaaccactctgtggtgggagagatcagaacggtggttgccccagggtggggggcttcaaaagggaggcacacaaggacatttctggggtaatagaaatgctctgtatagtgattggggtagtggatacatgagcgaatccatttgtcaaaactcatcaaactgtgtgataagagtctgtgcattttatttatttcattttattttttgagatagagtctcactctgtcagcaggctggagtgcagtggtacgatcttggctcactgcaacctctgcctcctggattcaagcaattctcctgcctcagtctcctgagtagctgggactacaggtgtgtgccaccatgcccagctaatttttgtatttttaatagagatggggtttcaccatgttggcaaggatggtctcgatctcttgacgtcgtgatccgcccacctcagcctcccaaagtgctgggattacaggcatgagccaccacacccggtgcattttattgtatataagttatacttcaataagaaatgaattggggccaggcacggtggctcacgcctgtaatcccagcactttgggaggccgaggcaggcagatcacttgaggtcaggagttcaagaccagcctggccaacatggtgaaaccccatctctactaaaaaatataaaaaattagccaggcttcctggcatgcgcctatcatcccagctacttgggaggctgaggcaggagaattgcatgaactcgggaggtggaggttgtagtgagctgagatttcgctattgcactccagcctgggcgacagagtgagaccctgtctcaaaaagaaaaaaaaaaaaaagggtcaggcgccgtggtgcacacctgtaatcccagcactttgggaggctgaagcaggaagattgcttgagcccaggaattcaagaacagcgtgggcaacatagtgagatcccatctctacaaaaaaacacaaaaaattagccgggcatggtggtacgcacctgtagtctcagctactagggagactgaggtgggagaatcacctgagcctgggaggtggaggttgcagtgggttgaaatcatgtcactgtactccagcctgggtgacagaatgagaccctgtctcaaaaaaaaaaaaaaaaaaaaaattccctttcacacttcctttacctccactcccctttccagagggggccatggttaacagtgtgtgtgttcacctagaccgtttatgcatctgtagacacacacacagtgaagtgtggttttcgtcgttttggtggggaggttggtttctgtaaatgggaacatatagggagcactgtctgcaccttgctttgagagccggtcatgacagttcccattgaactgccttgttctttcaatagctgcagagcaggtggcggcaaggagaggcagctaagagcccagacttgggagccagactgcctgggtttgaaacccggctctaccacttactaggcatgtgacccttgtgctgtgcctcagtttcttcatctgtaaagtgggggcaagaacagtcccaacttcataagatggttataccaccatgcctggccagatgattataaagtttgaatgagttaatatttgtaaagctcttagaacagtgcctggcagatactaggtgctcctaaatgttggtttttattatgtggctgggtggctcggggttttatttaacagctcccctatttactaatagacatttagatcatgttccattttcactcttacaaacagttccactttgtgtgtggctctgggaacatgggccagtgtctccctaggccacattcctagaaataagatttcttttcttttttttttttttttgagacagagtctcgctttatcgccaggctggtgtgcagtagtgtgatctcggctcactgcaacctctgcctcccgggttcaagtgattctcctgcctcagcctctcgagtaactgggactataggcgcgcggcaccacacccagctaatttttgtatttgtagtagagatggggtttcaccatgttggccaggatggtctccatctcttgacttcgtgatccgcccgcctcggcctcccaaagtgctgggattacaggcgtgagccactgagcccaggcagaaataagatttctagatcaaaggatataaatactgttttgatagatgttgccgaactaaggcctgggctttgaagcccaggatgggaacagctgggctcgatgggcaaagggtttgagtgaaggcattcatggtggggagtggctggcatggccagtgctgggagtgatgtccaccctgttcctggccctgctgactcctctcctgacccctccagggacccagcctccaacactgccccgctccagccagagcagctccaagtgtttgagactctggaagagatcacaggtgggctctgtctctgcatcctgttctgcaggggctgggagtccttgtcctgtccccactcctttaatctcaccctctgcctgcaggttacctatacatctcagcatggccggacagcctgcctgacctcagcgtcttccagaacctgcaagtaatccggggacgaattctgcacaagtgagcactgagaaagagggggcctgatggggaggagtcccagggaggagtccctgtgggaagctttgggcctgagggagtactcctgtagcagtaacctttccatgaaagtctgcagagtgtgctggggatggaggaagatgagaatagcctttgctgaccgggaaggggtccgtggtaaggtgcccacctttctcccatagtggcgcctactcgctgaccctgcaagggctgggcatcagctggctggggctgcgctcactgagggaactgggcagtggactggccctcatccaccataacacccacctctgcttcgtgcacacggtgccctgggaccagctctttcggaacccgcaccaagctctgctccacactgccaaccggccagaggacgagtgtggtaagacagggagcccagtgtgcgcactccccatctgccagcacacagcagtgcccagggggccctggcagcagcgttcttggacttgtgcagactgcccgtctctgtgcacccttcttgactcagcacagctctggctggcttggcctcttggcatggcttctctagctgggtcctacctgccttggcatccttccctccccctctgtttctgaaatctcagaactcttcctctccctacatcggccccacctgtccccacccctccagcccacagccatgcccacagccagttccctggttcacttggacctggggcctcccctaaaagtcccctgcggtcccttcctcctcactgcagtgggcgagggcctggcctgccaccagctgtgcgcccgagggcactgctggggtccagggcccacccagtgtgtcaactgcagccagttccttcggggccaggagtgcgtggaggaatgccgagtactgcaggggtatgaggggcggaggagagggtggctggaggggtgcatggggctcctctcagaccccctcaccactgtcccttctctcaggctccccagggagtatgtgaatgccaggcactgtttgccgtgccaccctgagtgtcagccccagaatggctcagtgacctgttttggaccggtgagctgctggcgggctcagagctgggtggaggggggcagcgagggggattgccagggacttggcaggatggcgagatgcagtagggtgtgctatctggtaaaatatccctggagagggctcagcgctcagacctgaacagcaacagagtggcagaaaaggggcctgggggacactggggcccttcagactatgaaaaggttctaaggaggtctgtgttggtggctgtgactgtggctgtgctagggtggtgagccctgtgggctcaggcgtcagactacctggattcagacccagctcctgcttccaaccttggttttttattcctaaaatgggtattgtaataatacctaccttgctggggtgtggcaagaatgaaattaaacagggcttggcacagtgaagcacgggaaaggctttctacagagcagtgactgttgttactcgctgttacaccttaggtaatgcgttttcctctctgggtgcctcccattttctggctcaagtccctgcccaggatcaagcttggaggagggccccgagggaggggccacagagactgggtgaagagcaagggtgtttgtcccaggagcatggcgaaaattgctgctgggtggccttgggaagcacaaaggggacccaactaagggcctgatcctactgccctgggggtgtcagtgccagccccccacaaatcttttctgccccccccaggaggctgaccagtgtgtggcctgtgcccactataaggaccctcccttctgcgtggcccgctgccccagcggtgtgaaacctgacctctcctacatgcccatctggaagtttccagatgaggagggcgcatgccagccttgccccatcaactgcacccactcgtgagtccaacggtcttttctgcagaaaggaggactttcctttcaggggtctttctggggctcttactataaaaggggaccaactctccctttgtcatatcttgtttctgatgacaaaaataacacattgttaaaattgtaaaattaaaacatgaaatataaattaatgccctagcagttctatccccactgttaataatttgaaatatttttcctctagttatttttgtctgtgcacattctaatatgtatatataagttaacatatattaatattattctccagttatttttatctgtgcacattttaacacacacacacacacacacacacacacacatatgtatttttagacggagtttcactctgtcgcccaggctggagtgcagtagtacaatcttggctcactgcagcctccacctcctgggtttaagcaattctcctgcttccgcctcctgagtagctgggattacgggaacgtgctaccttgcctggctaatttttgtatttttagtacataggatttcaccatgttggccaggctggtctcgaacccctgacctcaggtgatctgccagcctcggtcccccaaagtgttgggattacagcggtgagccaccatgcccagtcatatatttctttttaacaaatagaatcatagatcatacatattgtttgcaaattgctttttctcactttccagaaccttgaaatgtttttccatgttctaacatggtgatctaccttattcttttaatttttcttatttagttgtctttacacatgaaacacatgaatacatccttgtgataaacattttcagtaacataaaagtataaatgttacaaagccaacgtgccctttcactcaactccctgtccacccagtctctcctgtctgctgggagaaccaccgcattgacttgtgtgttcacccttccaggctcttttctgcacacttatatagacatactacatttatattaggtcgagtcaaataagattgctgtttgtgtaaaccaaaaagtgtcaagagcctgggcgcagtgactcacacctgtaatcccagcactttgggaggctgaggcaggcagatcacttgagatcaggagttcgagaccaatctggccaacatagcgagaccccgtctctactaaaaatacaaaaactagccaggtgtggtgatgctgttctgcactttgctttccccccgacttgaggtatcctttcttgtgagtacagacggatctaccacctttattttttttttaattactcaacctgtaacatggatgtaatttcactttgtttttgagggatattgagcttgtttccctgtttttgcagtttattgcaattgagctccacacacaagtgagccctcttttgtatgccccctagtgggaatacagtgctggcaatgtttatcacaaggatatattcatgcatttcaatttaaagacaactaaatgagaaaaattaaaagaatatggatccaggctgggcatggtggctcacgcctgtaatcccagcactttgggaggccgaggcaggcagatcacctgaggtcaggagttcaagaccagcctggccaacatggcaaaaccccgtctctactaaaaatacaaaaattagccaggcgtggtggtgggcgcctgtaatcccagctatttgagaggttgagacaggagaattgcttgaacctgggcagcggaggttgcagtgagacgagattgcaccagtgcactccaacctgggcaacacagtgcaactccttctcaagaaaaaaaagaaaaaaaaaaagaatatgggtccagatccatatggatcctagatccagatcacggtgttagaacatggaaaaacattgcaagattctgctaagtgaaaaaagcatttgcaaacagtatgtacagtctatattcagaggaggaactgctgggtcatagatgatatttcataggtattgccaaaccgttctctggagaagtggtatgggtttaccctgggattcttctatggagggaatagttgagctcccgggcttgctcttctgggtgcccctccccgcttcctatccaccacaaggagctgcaggggagcggggcatgccggttccttggctggagaaggagtctccttgtgaggtggtagaaggagcactgacggccttgagcccagtttctgcctttgtcaaatggggataatgacccagccacacccctcccagggttgttgtgaggctggaaaggtggttcccaagagggtggttcccagaattgttgatgagactgtttctcctgcagctgtgtggacctggatgacaagggctgccccgccgagcagagagccaggttggcctggaccccaggatgtacccttcattgcccttcactcccccactggatgctgggtggtcactgctgtagggaggggaccccctgacatatgtcccttcccacccactcttccactgtggaacctcctgtcattttccacttcaccaagtgacagaggacctgctcagatgctgaggggaggggactgcaaggaaagatggctaggaaacccagtccctccacaccctagagtaacttgatgccttgtgagggacacaggcaaagttcaattccttggaagtcaagggagactgagaagagtacagctgcagcactgagggagtgatgaattcttaactggggatggtgggaggcttcgagtgggaggtggcatttgagctaggctttgagagaggagcaggtattgcacttgcatttaggtagaaagcattggggtgcaaggtgacactggagggggaggcatcaggaaatccaggatgtcttcaaagttctggtgtcgggggctgttgagtaagcacaggaataagggggtcaagttagagtcagggtggggtctgacctggatgccataggacctgatccccaagccacagggtgggacttgactgggcagtggggacctttggaaaggactttggggagaaaaacagactggagtctgtcttaggcgatcatcggtccgtgaaatgagcatgtgttacaggcttggtatgtaccagaccctgtgctaagcaagggggtatggagaggagagggtgacaagaatattggatcaacacccgggagctccatctatcccaggatgcactatcttttttttatttttttgagacggagtctcactctgcctgcaggctggagtgcagtggctccatctcggttcactgcaacctctgcctcctgggttcaagcgcttcttgtgcctcagcctcccaagtagctgggattacaggcacatgccaccacacccagctaatttttgtatttttagtagagacggggtttcaccatgttggccaggatggtctcgatctcttgacctcaagatccgcccaccttggcctcccaaagtgctgggattacagacatgagccaccgtgcccagccagatacgctatctttttattgagtgattgagacagggtcttgctctcttgtccagtcttgaatgtggtggtgtaatcacaggctcactgcagccttgacctcctgggctcaagttacccttctgcagtagctgggactataggagcgtgccaccacgcctgggtaatttaaaaaattttttttgtatagacagggtctcactatgttgcccgagctggtctcaaactcgtgggctcaagtgatcctccagttttggcctcccaaaatgttgggatcacaggagtgagccaccactcctggcgatgagccaagtcttttttttttttttttttttttgatatggagtcttgctctgttgcccaggctggagtgcaatgacacgatcttggctcactgcaacctctgcctcccaggttcaagcagttcaagcaatcctcctgtctcagccccccagtagctgggattacaggcatgcgctaccacgtccggctaatttttgtatttttagtagagatgaggttttgccatgttggccaggctggtcttgaactgctgacctcaggtgatccacctgcctcggcctcccaaagtgctgggattacaggtgtgagccatcgtgcctggcggagccgagtcttaaaagatgaccctgtggagaaatggtggtccaggctgaagggacagcctatgcaaacactgggaggtgtggaaaatcatgacctgtgggtggaaattttggctagaacatcaaaatcatcaggtgtacattcctgtacccatgcagcagtcagaatctctgggggtggggccccaaaattgtatgcatacagactgtgtgctgatttgtgatattacttaggattttttgactttacaatggtggaaaagcaataatatacattcagtataaaccgtactttgaatacccatacagccattctgtttttcacttttatttttatttatttatttatttattatttattttgagatgtcattttgctgttgttacccaggctggagtgcaatggcgcagtcttggctcaccgcaacctccacctctcaggttcaaacgattctcctgcttcagcctccagagtggctgggattacaggcaggcaccaccacacccggctaattttgtatttttagtagagacggggtttctccatgttagtcaggctggtctcgaactcgagagctcaggtgatctgcccatctcagcctcaagccaccatgcccagccctactttcagtattcaataaattacatagccaggcaccgtggctcacacctgtaatcccagcactttaggaggccaaggtgggaggatcctttgaggccagaagctcgagaccagcctgggcaacatagtgagaccccatttctacaaaaaataaaaaaactagctgagtgtggtggcgtgtgtctgtagtcccagctacttgggcagctgaggtggaaagactgcttgagcccagaggtcagggctgcagtgggccatgatctcaccactgcactcagcctgggcaacacagcaaggccctgtctcaaaaataaataaataaataacacaaacttatttaacagtttactataaaataggctttgtgtcagatgattctgcccaactgtaagctgctggcagtgtaaatgttctgagcacgtgtaagccaggctaggtgtcttaaatgcattttcagtttcaacttagaattggtttatcaggacgtagccccttggtgttgaggggcatgtgtattaacagtctccttagtgacttttttttttttgagatggagtcttgcactggccgtagtgcagtggcacaatctcagctcactgcaacctcttgtctcccgggttcaagcgattctcctgcctcagtctcccaagtagctgggattacaggcacccacaccacgcccagctaatttttgtgtgtgtgtatttttagtagagacgggggtttcactatgttggccaggctggtctcgaactcctgaccttgtgatctgcccacctcagactctcaaagtgctaggattccaggcatgagccaccgcgcccagagtccttagtgatttttacaccatgaattgttgaagccctaagccagagccaagggcaagagtatagagaatctggagatgcggagagggttctgattgcctacaaggagtttggactttattgtggaggcagcggggagccaaggcaggttttagagtaggagagggtccaagcctgtgggtcacccttccgacttccctttccgaatgccaaacaccttcatgtcccccgtgggccccctttgtccctcccaccccaaactagccctcaatccctgaccctggcttccgcccccagccctctgacgtccatcatctctgcggtggttggcattctgctggtcgtggtcttgggggtggtctttgggatcctcatcaagcgacggcagcagaagatccggaagtacacgatgcggagactgctgcaggaaacggaggtgaggcggggtgaagtcctcccagcccgcgtggggtctgcaccggcccccggcactgacccaccaccccctcaccccagctggtggagccgctgacacctagcggagcgatgcccaaccaggcgcagatgcggatcctgaaagagacggagctgaggaaggtgaaggtgcttggatctggcgcttttggcacagtctacaaggtcagggccaggtcctggggtgggcggccccagaggatgggggcggtgcctggaggggtgtggtcggcagttctgatgggaggggcaagagctggaggcagtgtttgggggagggcagttacagcggagaagggagcggggccaagccctagggtggtgaaggatgtttggaggacaagtaatgatctcctggaaggcaggtaggatccagcccacgctcttctcactcatatcctcctctttctgcccagggcatctggatccctgatggggagaatgtgaaaattccagtggccatcaaagtgttgagggaaaacacatcccccaaagccaacaaagaaatcttagacgtaagcccctccaccctctcctgctaggaggacaggaaggaccccatggctgcaggtctgggctctggtctctcttcattggggtttggggagatatgactcccgcaaacctagactatttttttggagacggagtcttgctctgtcacccaggctggagtgcagtggcgttatctcggctcactgcaacctccacctcctggactcaagcgattttcatgcctcaggctcctgagtagctgggattacaagcgcccgctaattttttttttttttttgagacagagtctcgctctgtcacccaggctagagtgaaatggtgcggtctcagctcagcctcccaggttaaagcgattcttctccctcagtctcctgagtagctgggattacaggcgcgagccaccacgcccggctaatttttgtatttttagtagagatgggatttcaccatgttggccaggttggtgtcaaactcctgacctcatgatccgcccgcctcggcctcccaaagtgctgggattacaggtgtgagccaccgtgcccggcctaatctttgtatttttagtagagacagggtttcaccatgttgtccaggctggtactttgagccttcacaggctgtgggccatggctgtggtttgtgatggttgggaggctgtgtggtgtttgggggtgtgtggtctcccataccctctcagcgtacccttgtccccaggaagcatacgtgatggctggtgtgggctccccatatgtctcccgccttctgggcatctgcctgacatccacggtgcagctggtgacacagcttatgccctatggctgcctcttagaccatgtccgggaaaaccgcggacgcctgggctcccaggacctgctgaactggtgtatgcagattgccaaggtatgcacctgggctctttgcaggtctctccggagcaaacccctatgtccacaaggggctaggatggggactcttgctgggcatgtggccaggcccaggccctcccagaaggtctacatgggtgcttcccattccaggggatgagctacctggaggatgtgcggctcgtacacagggacttggccgctcggaacgtgctggtcaagagtcccaaccatgtcaaaattacagacttcgggctggctcggctgctggacattgacgagacagagtaccatgcagatgggggcaaggttaggtgaaggaccaaggagcagaggaggctgggtggagtggtgtctagcccatgggagaactctgagtggccacctccccacaacacacagttggaggacttcctcttctgccctcccaggtgcccatcaagtggatggcgctggagtccattctccgccggcggttcacccaccagagtgatgtgtggagttatggtgtgtgatggggggtgttgggaggggtgggtgaggagccatggctggagggaggatgagagctgggatggggagaattacggggccacctcagcatgtgaagggagggaaggggctgcctgtgccccaccttgcagggtctgtgcacttcccaggattagggaaagaccgggtagggtctgtctcctggcatcacatctccccctgctacctgccatgatgctagactcctgagcagaacctctggctcagtacactaaagctccctctggccctcccactcctgaccctgtctctgccttaggtgtgactgtgtgggagctgatgacttttggggccaaaccttacgatgggatcccagcccgggagatccctgacctgctggaaaagggggagcggctgccccagccccccatctgcaccattgatgtctacatgatcatggtcaaatgtgcgtggctgagctgtgctggctgcctggaggagggtgggaggtcctgggtggaggagcccacaaggggcatgaaaggggaccaggatgtatgtagacccaggagccctagtatgttaggagcctcaaaaccttcttgtatcccttttacagtcaaagtccaaagccactcttgaggaacactcttgtacaaaattaagctgggcacagtggctcatgcctgtaatcccagtacttttggaggctgaggtgggaggatcccttgaagccaggagttcaagaccagcctgggcaacatagtgagatcctatctctacaaaaaataaaaaaattatctgggtgtggtggtgtgtgccagtagtcccagctactcaggagaggctgaggcaggaagatcacttgagcctagtttaaggttgcagtaagctatgattgcaccactgaaatccagcctgggtgacagagcgaaacctcatctcaaaaaaataaaaaagcaaacaaaaagaaaaaaaaaattaaaagggaaactagaagagatgccaaaggttctggctgaagaccccagagtctggtgctacttctctaccacctgagggctttgggctgtcccttgggactgtctagaccagactggagggggagtgggaggggagaggcagcaagcacacagggcctgggactagcatgctgacctccctcctgccccaggttggatgattgactctgaatgtcggccaagattccgggagttggtgtctgaattctcccgcatggccagggacccccagcgctttgtggtcatccaggtactgggcctctgtgccccatccctgcctgtggctaagagcaccctcctgcagagggtgggaaggagagatgagtccagtatgccaggcccctcacggaaggctgcatgctgggctggggaggggccaccatcctgcctctccttcctccacagaatgaggacttgggcccagccagtcccttggacagcaccttctaccgctcactgctggaggacgatgacatgggggacctggtggatgctgaggagtatctggtaccccagcagggcttcttctgtccagaccctgccccgggcgctgggggcatggtccaccacaggcaccgcagctcatctaccagggtcagtgccctcggtcacactgtgtggctgtctgcttacctcccccaaccccggtggactagggtccctttctctgatgttccctcaactgtcacctctcaaggaaaccccattatccctacaaaaaattcttactgccttccaacccctgtgaccccattctctccacggtgactgtgtcataccccaaaggtgacctctgtttttctcctgtgaccctgtcaccttccatggagtccccatcccagatccgtgagtgacccccatcatgactttctttcttgtccccagagtggcggtggggacctgacactagggctggagccctctgaagaggaggcccccaggtctccactggcaccctccgaaggggctggctccgatgtatttgatggtgacctgggaatgggggcagccaaggggctgcaaagcctccccacacatgaccccagccctctacagcggtacagtgaggaccccacagtacccctgccctctgagactgatggctacgttgcccccctgacctgcagcccccagcctggtatggagtccagtctaagcagagagactgatgggcaggggaggtgggaccttcagcccagggtccactgtgggggcagagggagtggcagagacaccggggttccttcccctaatgggtcaccttctcttgacctttcagaatatgtgaaccagccagatgttcggccccagcccccttcgccccgagagggccctctgcctgctgcccgacctgctggtgccactctggaaaggcccaagactctctccccagggaagaatggggtcgtcaaagacgtttttgcctttgggggtgccgtggagaaccccgagtacttgacaccccagggaggagctgcccctcagccccaccctcctcctgccttcagcccagccttcgacaacctctattactgggaccaggacccaccagagcggggggctccacccagcaccttcaaagggacacctacggcagagaacccagagtacctgggtctggacgtgccagtgtgaaccagaaggccaagtccgcagaagccctgatgtgtcctcagggagcagggaaggcctgacttctgctggcatcaagaggtgggagggccctccgaccacttccaggggaacctgccatgccaggaacctgtcctaaggaaccttccttcctgcttgagttcccagatggctggaaggggtccagcctcgttggaagaggaacagcactggggagtctttgtggattctgaggccctgcccaatgagactctagggtccagtggatgccacagcccagcttggccctttccttccagatcctgggtactgaaagccttagggaagctggcctgagaggggaagcggccctaagggagtgtctaagaacaaaagcgacccattcagagactgtccctgaaacctagtactgccccccatgaggaaggaacagcaatggtgtcagtatccaggctttgtacagagtgcttttctgtttagtttttactttttttgttttgtttttttaaagatgaaataaagacccagggggagaatgggtgttgtatggggaggcaagtgtggggggtccttctccacacccactttgtccatttgcaaatatattttggaaaacagctaggcaccggcctatgtctgggggtggctctgtgccatcccttcctgctcaccttacactcaattcctcttttcctggagggagtggctgggaatcttcagaaagcttggatgaggagccagacatccagttctccagcttcagggttgggggagatcgggaagctggattcagatctgagagccctttgacgaccagatcattcttatttagaacgaactaattcctaaggccactcaccagaatggggttatttcctccttgtgagtgaggagagtggtgggtagggtgggggaaagacgaggcagggtctactgtgggactcattttccttgccttggctatgccagaggagctcactgacctaaggagtagctgtccagaaagcccacccagccagcacagccaccctggcggtgcaaaggctgggctgaccggacttctgtgccccccacattcccagactggacgtataaaaacacacactagttagcattagtgtttgtagcgccactttactgccaatagctgacattgccctgggttaggggagaataaataaaatctgtggcatcagacaggtattaccgaggcgaagagtggactgggctttcgtgggcacttaccctgggaagggggtatgaggtggctggagaagtgttcatggagagtgtctctctcctgcccccaaggccacggaatcttctattccttctttgtacccaaagggcaaagtggaggccagggtctctttgctaaggagctaagtaggggaaagaggcagggggagctcccagcaggaccaaagggagaccaaggtttggaccccagaacagagcaggaacccagagtcctgtgcagtcacaggatgacgcagggaggacggctgttggtgatcttttctagggtttctccattactggctcttcggatggcctcaatgagctagaggagtggaatgacaggatgatgcactgttggggtagggtgaccaagaggtcctcccaacgctgtaaatactcacatctttctcatagggaaagcccccattctccagcttggagaacaccagctgtccatttatctctatctcaaaggcacctggtaagaaatcaacagataaatggtacactgagaacataggcagaagtcaggagttcctccaaaggggtcccccgccttcaagtcccccatcaatcccactggagacccatttgtagctccttaagcaattccccaaccctgggtcaactccagggaacctgagggaggcctcgcctgtgtgcccctcgcaacactcaataaaggactccctcccctccaaccctacacgattgcagtctaataggtttttccccacaggcctctgtgacaccccctgacctatggaagggaactcatgttggccggacattttaccatgtgccaggcactgcgggcactttacataaagcagccaatgtcagaactagaaagcgggagagctgggattcagagcacagactgacccagcaggtgttctgcgagcctcacctgtgcccccgaggcgcgactcgatctcgatgcccggatactgctccttcacagcactggccagctccaggtaggtcgcctcgaagccgcagggttcactggggagtcaagagatggggctgggctggggattcgggggtggggcctcccgtggacccacctccgtccggcccgcgggaccagggtgcgggtcctccagccggggccgctcaccagtactccaccacgatgcggaccccactgcccggctcgacctcctcgggagggggcgctacggacgtctgccccggctccccgctcatcgcggccggctccgctcgggcccctgcttccgggtgtgacgcgaaccgcgggcacgtgacggggcggggcctctggagcggggaggggccgagggtggcgttcgggcgccccctgcgggtctccgccactgctacgttttgacctcgtagggcagctccggagctcgctccccgggcaggggctgggtccggtccagaccctccttccctggcccggtctcccggagtgccgggcttccccactccccactcccggtgtccgctggacttcatggcttcatttactctaatggactatcttagactgcaaagcgcttttcagtttacaaaagaaagagaaagtggtggggcaagcatcctggggatgggggtgggtgtggctgatgcatgaaatagttgacattttctcgctaacatgccgatggcattttttttttttttttttttgagacggagtttcgctcttgttgcccaggctggagtgcaatggcgcgatctcggttcactgcaacctctgcctcccgggttcaagcgattcttctgcctcagcttcccgagtagctgggactacaggcgcgtgccaccgcacccggttaattttgtattcttagtagagacagggtttcatcatgttggtcaggctggtctcgaactcttgacctcaggtgatccaccagcctcggcctcctaaagtgctggaattacagacatgagccaccgcgcctggcccagttttttgtttgtttgtttgtttgttttagtagagacagggtttcaccatgttcgccagactggtctcgaactcctgacctcaaatgatctgcctgccttggcctcccaaagtgctgggattacaggcgtgagccaccacgcccggtgctgatggcatttggaaccaccctgtagttacatacacaagtgtttctgatcccaaagctctaaactgctttttccagtcttttgcagctgcttcttgcctgcactggaaaacagtagatgctcttcaggctctgtgcccccaacagtttctgcgcatcccttctcatccagcctctcactggggggctggcgtcattattcccattttgcagctctggaaatggagtctgcacaagtcctcgctgccttttccctgcctacagtaccactatggtatcctaacacgccacccactctagtgtccctttaggctatttatttatttatttatttattttgagatggagtctcactctgtcacccaagcttgagtgcagtggcgcgatcttggctcactgcaacctccacctcctgggttcaggcgattctcctgcctcagtctccctagtagctgagatcataggtgccagccaccacgcccagctaacttttgtattactattattattatttttttgagacagagtcttgctctgttggccaggctggagtgcaatggtgcgatctcggcttactgcaacctctgccttccggcctcaagtgagtctcctgtctcagcctcctgagcagctgggattacaggtgcccaccaccaagccagctaatttttctatttttagtacagatggggtttcaccatgttggccaggctggtctcgaactcctgaagttgtgatctgcccatcttggcctcccaaagtgctgggattacaggtgtgaaccactgcacccgggctcattttttttttttttaaaccaggcaggtcgtagtggctcacacctgtaatcccagcgttttgggaggccaaggtgggcggatcacttgacgccaggagttcaagaccagcctggccaactcgacaaaaccctgtctctactaaaaatacaaaaattagctgggtgtggtggcgcaccagctactccagaggctgaggcaggagaatcgcttgaacctgggaggtggaggttgcagtgagctgagatctcaccactgcactccagcctgggtgacagagtgagactgtgttccaaaaaaaaaagaaaagaaaagaaaagaaagaaaatgcagtgatttgtactgttgcctaaccatcactacaatccagttacagaatgtttccgtcaacctgataagtccttcccacctgtttctggtcaatccagctcccaattccagtcctgtgcaaccactgatctgctttctgtctctaactttgccttttctggatgtttcatataaacagaataatacactatgtggccttttgcttctggttctttcattcaatatgttttttgaaatgcgttcatcctgtagcgtctagagtagtttgttccttttcattgctgagtcgtattccactgtgtggttatgccacatttttttcttaattcaccagctgatggatatttagggttccagttttttttgtcttttttgaataatgctgctacaaatgtttaggtgtctttgtataggtgtgtgttttcatttctcttgggtagattcctaagggtagaactgctgggtcctgtgtttaatttatgattatcttttttttttttgagacagggtctcgctctgttgcccacgctggaatgcagcagtgcaaacatggctcactgcagcctcgacctgctaaactcaagctatcctcttgcctcagcctcctgaatagctgggacgacagacacgcaccaccatgcccagctaatttttttttgtattttttgtagagacaaggttttgccattttgcccaggctagcatttaacattttaagaaatggccagactgtttttcaaagttttcccaccagcaatatatgaggatttgtctctccatatcctcaccaatacttgttttctgtctctttgattataaccatcctagtggacatgacatggtatgtaactgtggttttaattctcatttatctaatgactatgtcgtgtatcttttcatgtagttattagccattcatatacatattatttgaagaaacatctattcaagtcttttgcccatttttatttgtctctttattattgatttgtaaaagttctttatatattttggataccaaccaaaatatatacaaccatatatacaaccatatatagttgtatatgatttgcaactattttctcccagtcttcggctagttttttttcttttttctttctttctttctttttttgagacaggggtctcactgtgtcacccaggctggagtgcagtggcacaatcttggctcacttcaacctccacttcctgggttcaagagattcttgtgcctcagcctcccaagcagctgaaattacaggcgtgcaccaccatagcccagataattttttgtgtttttagtagcaatggccaggctgttttcgctatgttggcaaggctggtctggaactctggcctcaagtgatctggctacctcagcctcccaaagtgctgggatcacaggcatgagccacttcatctggcttcattttttctttcttttctttgagacagtgtctttctctgtcacccagactggagcgcagtagcacaatcacagctcactgcagccccaacttctcaggctcaagtgattgtcacacctcagccccaccaagtagctaggactataggcccgcaccaccatgcctggatagattttatatcttttgtagagatgaggtcttgccaggttgcctaggctggtctcaaactcctgggctcaagcgattcacctgcctcagcctcccaaaatgctgggattacaggtatgagccaccatgcctgaccccttctttttttttttttttttttttttttttttcgtatggagttttgctcttcttgcccaggctggagtgcaatggcaccatcttggctcactgcaacttccgcctcctgggtttaagcgattctcctgcctcagactcccgagtagctgggattacaggcatgcaccaccatgtctggctaattttgtattttttttttttttttttttttttttttagtagagatggggtttctccatgttggccaggctggtcttgaactcccgacctcaggtgacccatccgcctcggcctcccaaagtgctgggattacaggtgtgagccactgcgcgcggcctcctggcctcttattaatggtggcttttgaagtgcaaaaattttaaattttgacaaagtctaacatcaatttttttctcttgtcagttgtctttttgctgttatattcaagttctctgcctaacccaaggtcatgaagactatctcccatggtttcttctagaagttttatggttttagctcttacattcaggtatctgatctatttcaagttttttttttcttatgcatcctgtgagcaaaagatctaaattcaccttttggcatgtggctatccaattgatcacagcagcatttattgaatgcctatcctttcctccatgaaattgtcttggcaccttgtaaaatcaattgaccagaaatgtaagggtttctacttggactctggattctgttccattgacctataaacgcattcttatttattattattattattttcccccgagacggagtcttgctctgtcaccctggctggagtgcagtggcacgatctcagctcactgcaacccccgcctcctgggttcaagcaattctcctgcctcagcctcctgtgtagctggaattataggtgcacaccaccatgcccagctaatttttgcatttttagcagaggcggggtttcaccatgttggccaggctggtctcgaactcctgacctcatgatccacctgcctcggcctctcaaagtgttgggattacaggtgttagccaccgtacctggccttatagttgttgttgtttttaaattcagatacaacttatacacagtaaaattcatcctcttgagtgtacctttcttttttttttcttttcttgagatggagtctcgctcttgtctcccaggctggagtgcaatggctcgaactcagcacactgaaacctccgtctcgtgggttcaagagattctcctgcttcagcctcctgagtagctgagattacaggcgtacgccaccacgcccggctaatttttgtatttttagtagagacggggttttgccatgttggtcaggctggtcttgaactcctgacctcgtgatccacctgcctcagcctcccaaagtcctggaattacaggggtgaaccacgcacccagccttgagtgtgcctttctatgagtcctaagaaacacacacatttgtgcatccaaccccaaaaccaagatacagtatggtcccatcacctctcacaagtccctgtgccccctactgtggacccctctccctcctccccaaccccagacctggtttttgttcacacagttccacccgctccagaaagccatataagttgattcctacagcactccgccctctgactgtggctttgtttccatcccatccttcaatatccaggatgatctttccaaaatgtaaatgtgccctctcctctgtgcttctacttaagtctaaatacaacttgcagggtctggtctttgaccgctactcctgcccatctggacaaacaggatggatggctctcaaacctggtttgcagaacagccacctgagggcttgtcaataccacaccttcctgggtcttagccctagagactgagattcagttgctggagaggagcccaagaatctattttccacacaaggttagggaggtctagaggccacatttgcagaagcacagcttcctctctccacaccttccacacctgtccaggttcacccacgtggcctctgcttcctcccttctcctccaaccccactctctgtctccgcatgctgcatctcctcctgcccagagctctggcattgatttcctcactggggaaagtggcctccttccccaattcccatccaccgattccaacccccttcccatgtcagccagcttctcctctgctcagctgtcacctccactgagaagtctttcctgactccctatgtgagtcattttcccagcatagttgtctcctgtcatttcttatttgtgtgattctttggttaacatcaatcttcctgattggctgtgtgaggatgggcggggtctgtttttgttgtttacgcctgtatccccagcacaaaacatggggctggcatatggtaggtactaaacagatagttgaataaatgaatgagtgaattgtctactctgcctttgcacaagctgctccatcaccaaagagaccttgcctcctcccccacttctttgctgggcccactcataccggttttcctaggaaaactctggagaaaattgaggcaggagccactcattcgtgccccttccagggtggacctcttatcaccctaaggattgtttgttttcctgtcacccacatcaagctgggtggtggccgcagcctttgatctccacctcctaacccctctcccaagtaccctgtgtttgcccagcactgaatgagacagctaaagtgatccctgagagaactaaagtgttccctcaggccgggcgtggtggcttatgcctgtaatcctaacactttgggaggccgaggtgggcagatcacctgaggtcaggagttcaagaccaacttggttaacatggagaaaccccatctttactaaaaatacaaaaattagctgggtgtggtggcaggcgcctgtaatcccagctactccggaggctgaggtaggagaattgcttgaacctgggaggcagagtttgcagtgcgccaagatggcaccactacactccagcctgggtgacagagcgggactctggctcaaaaaaaaataaaataaagtgatccctctaagaggaatccccaggggcccaggccagagctttctccaggtcaccatggctcctcccactgtgccaccctgcctaaccccctcgattttaaaggagaagccaagactctggactttgctcagaaggtggggggcgggggagggagggcttaccctgggtacctctgaggggccagggcgcagccaccacggtaagggtgactgcagatcgaggggcaggccatgttgctggacaccaccctggctggcgtccctctcggcagggtgctctttgccccatggggtgggatccagagctgcagacaggcccccaggcttggccaatgaacagaccaggttcggggagggtgttggaaaagagtggatggggtggttccccttaccttgcagcccccaggccctcccccctccctcccaggtggtcgggactcttgatcttcgctcgtggtactgtctgttcggctgtcttccccgcctctccccaggcacctgcatcctcccttggcacctgctgccaggctaggaagggcaaaaacaatcccagttggcgtagtcagggagtctccgccctcctcccaggtttcctcctcccaggcgcctcccctggacccgcccccatctgcccaagataattttagtttccttgggcctggaatctggacacacagggctcccccccgcctctgacttctctgtccgaagtcgggacaccctcctaccacctgtagagaagcgggagtggatctgaaataaaatccaggaatctgggggttcctagacggagccagacttcggaacgggtgtcctgctactcctgctggggctcctccaggtaaggggaccgagatcggtctcagacgacagcctgccaggcaacccccagccgcaccagggccccaggctgtgccagtctccggctgaactggccggcggcccaggtgggaggattggagccacctggctctccccctcccccgctcggtgatgtcaggccaggggcgggggctggagggggacaggtagttaagggcctggcgtctccctccctgaagacgtggtcccagccgggtgtcctgacgctcggggttcaggtaagaacccaagcgggcatttatcctttgggggcaggcacggccggtctggaggccggtagggaaaggctgggtctcctgatgggttgcttggcctcccacttttctcttttctgtccatttcccaccctgccccctcctccccacccgccctcttttcgtccccatcctggtttccagcgctccttgttccctccctgtacacctccctgcaggcagcagctgagaatgggaaggaagacctgattctctcctccgacttggctttcccgctgaaactagcccctccccgcacacccggggagagccgccctcactctctggctcgcccagtttaccccagtttgggtttccccaagtctctaagacagacgtctctgcgggctgcggggagatgtggggagggccccctccactttggagggcagtgaaggagagggatcctctaaattgtcgaggcttcatctctccagattgtatgcccttctcagcaacaccgcctccggccctccgatgggaaagtggaggccgggtgagacggggtccctcctggcttcagcatgaaatgggcaggaaggctggaggggtgtatgaggggctctgcagtgcggtggggcctggggagagtggggtgggggatagcagatggtttcttctgcttgatgaggctagggagagacccaggttcccggtctgggtctccctggcagattgaggacagagaatgaatgcatctgccggcaaggtggaacgccccccaccccgccccccaactagccgcaccgccccccaggaatgccctcttttggtccgccggtcttggactctgctctcccctctcctgatatcctactgtatgcttggtggggggacctcatggaggcgggcagcctgtaatgattaactgcagagacactccagcattcttcccgaattaaactttaaaagagctgccccgccttctcccattgggtatttttcctgagtgagagtgggcggggcctcagagtcctgggtcctcccttatactaggagtcatccaggggtttctcaccttctcacctgggccctgcaccctaaaaaattataagcctctcccgtgggggcggggcgtggagtactgggcggacgggggctctcccgccacatccaggcccctggcccaggcctcagtcccgcaagcccttccccctgctctgggaagcagagttgttttctgttggccctgaacaccgggccccgccacctgcccttagggccagccaggtggggcgtgattcaggaagtaaacaaggaggttgggaggacgggaacgcgggtggggctggaaccactgggggaggaggcagctgggaagccacggacggagttacctcgttgaggggacaaactgattttgggggtcggtgtttccaaccgaagctttaccggggcctcagtttgaaaactccagatctctaagctgccaggcccacagccaggaccccttcctcctccctgctcaccccattggtcttgacgattccacccgcctccagccttagaagcttaagggcacggctggggggctctgaaggcaaaccccagccttggactggccctctctgatctctgaggccaggctctaatgtgatttgaatctacttctaaccccttccaagcactgccctcccgaattctctgctcctctccccaccccactgttggtctgtgatttcgaggcaggcgtggccccctgcagcctggaatgaagtcactggggctgtttggagaccggggctgtttggaggttagactggggtgggagtgggggattgtgttctggtattgaggtgctggtgtctcttgctagcgggtgatgggtgtgtcgtgcccctcctggcaggaccctgagccccctccctggcctttcatcctgtctgtcttcttgagtgttttccctttccactcctgctcctgtggtacccctctggccgggacacccaggagaatgtgtcaggaggaacttcatccacacagggcaggggctctgagcgatgctttgggtggggaggggcaccgccgggatgctggcttctctccaaatgggcctctgaatccaggccgggcattgcctctctccttcccaggcgagggactccctggcgaggaggtggtttgggactgggggtgagagcagatcgtaggtcccacctggcctggagctaggccgagggtggggaggaggaggtgatgtcaggagcctcaggcccacatcctcctcccccatcctgttcccagccccgtgcctcccccattccgctctggctagcagtgggttggggagttgggggaagggtggaggcagggctgtttttgtttctcctaagccaggaagttgtgtggatgagtcaaggttgaatggagagccctaggcagtgttgtcccgcccgccctgactcacctgtcccccaaatcccctgatgccctcactgaagggtcaggtgcctgctccctcctgaggggtcaatcccaggtgccccaggtggcctcatagtactggcccagtgtttggagaacaggctgggggctgggattgcaggttctcccaggtctcagcccggccaaaggggtctgctgggttcctgcggagaaggtgccagccccacctccacctctagtgctcgtctttgcctgctgtcctgtctttacttgtcttgagtgtctgtgcagcccctataagtgataagacatgggtgagattggccttgcctgggggtaccaggtgccctcagacaaatgggtggataggacaggtgcacagtaatggatgatgcggcccccgcacagtgctgagagagagtcattcagtctgaatgtggaaggccaggaaggcttctcagaggaggtggctctagcactggggcttcaggaaagagttgggcaggaggatggcctggggagggtacgcaaggtttgggggctgctggggccaggacccctaccccaggccctgctctcccccttgcactgcagcggagcccgctctcctgcctttctgactcccatccttccccacctccttctcccctctgcatcactcatcacttgggcaggccaaacctcgccaagtatgaacaggctctggcaactgggtctggcaacaaagtgctggaaaaacccggggcacagcccagcgcagtgagtgccccacacgtggaggcaaaggagtgggcctttgccctgaccctgagggctgagcctgagagtctgtgggttgtgaaatctgttgtgaccaccaggcttgtggtgggtggaccctcagctcttcctgtgagcaactttgtgctaaagaaagagcactggagccgggcgtggtggcttacgcctgtaatcccagcactttgggaggccaaggcgggcggatcaggagttcaagaccagcctggccaacatggtgaaaccctgtctctactaaaaatacaaaaattagacgggcgtggtggtgggcacctgtaatcccagttactcgggaggttaaggcacgagaattacttgaacccaggaggtggaggttgcagtgagtggagatgacgccgctgcaaaaaaaaaaaaaaaaaaggagaaaaaaaacagaaagagcactggacttggagtctaaacacaggttctactcccgactcacctgtgactgagggcaagaatgctttcttctcagagactcggtgtccccttttgtaaaatgaggctcattctgtccttccccaagggcttcagggaaactccagttagagcagtgaggtgctaggtaaactctgaggggcaccctaaccgccgtgtgaggtcaggaggtctgaattctctcatcccctctccccaggacaagggcacacaactggttccgttaagcccctctcttgctcagacgccatggagctggatctgtctccacctcatcttagcagctctccggaagacctttgcccagcccctgggacccctcctgggactccccggccccctgatacccctctgcctgaggaggtaaagaggtcccagcctctcctcatcccaaccaccggcaggtacgatggggcgtggggcttgggggaggtcagtgctggataatacacagaggcttgcaggccactgctcccttccccacacctctctccctttttcttcttgccacaggaaacttcgagaggaggagaggcgtgccacctccctcccctctatccccaaccccttccctgagctctgcagtcctccctcacagagcccaattctcgggggcccctccagtgcaagggggctgctcccccgcgatgccagccgcccccatgtgagttgtccctcagaagggaagggagggatgcacgggttctgggtctgtgggagatacacagccgcttccatggaggcaggggatcttggttaggagtccctgagggtctagcaggtgcggaaagggaatgaatcaccctttgcctcccctcaagtcgtgtgcaattcctggggcgcaggtagtaaaggtgtacagtgaggatggggcctgcaggtctgtggaggtggcagcaggtgccacagctcgccacgtgtgtgaaatgctggtgcagcgagctcacgccttgagcgacgagacctgggggctggtggagtgccacccccacctagcactgggtaagtcaggtgcatggaactatccgggctgggagatgatgccttgcatcttgggctaggcatgtggctcatccaggagatctggttgatctccaataacccctgctttttgcccttgtccccagagcggggtttggaggaccacgagtccgtggtggaagtgcaggctgcctggcccgtgggcggagatagccgcttcgtcttccggaaaaacttcgccaagtacgaactgttcaagagctccccagtgagtgcatgagggctgtctgggcgctgggatgccctgatcctcaacctggatgctggagccctgatccctgacacttgtctacccacagcactccctgttcccagaaaaaatggtctccagctgtctcgatgcacacactggtatatcccatgaagacctcatccaggtggggggaccccccatttcactgcagattcacgactccccagcattggccagtgcttctccacccttaagtcctgtgcctcccctctatgttgtagaaagagccaaatcacagtcctgtgtgactggggacagtcactttccctgcctgagcatcagtttcttctattaaatgggggcgagaaatgcatgtggagcatttccttgtaaaaacctgagggtgggctgggcacggtggctcatgcctataatcccagcactttgggaggctgaggcgggaggattacttaagcctagaagtttgagagtttgagaccagcctgggcaacataatgagacctcgtctctccaaaaaaaaaaaaaaaaaaaaaaaaaaggccaggaatggtggcatgagcctgtagtcccaggtgcttgggaggctgaggtgggaggatcacttgagctcgggaggtcgaggttgcagtgagctgtgatcgtgccaccgcactagcatgagaccctgtctcaaaaagaaaaagaaaaagagaaacatcctggtggtagaggggaagggaggaggtcagacctgtcactctcctctgctctcctctggctcagaacttcctgaatgctggcagctttcctgagatccagggctttctgcagctgcggggttcaggacggaagctttggaaacgctttttctgcttcttgcgccgatctggcctctattactccaccaagggcacctctaaggtaaggtcttgagggtaccagccccagcccctccagtccctggtccttttagaagttgccccttctctgctggaacctctgagcccttctccccctgggccccccaggccagccacctccagtttaccatctctccctacatccttgcctagctcacctgcccagggaggtagcaggagaaaagatgatcttagtttaagtcctggctctacttctatttgctgtgtgaccctgggtattcccctgcccctctctggtcctgaaatctccccacctggcttgtggggggaggtaatagtgggcgggatctacctgtaccaagtcctgctcactcatgctgcttaggatccgaggcacctgcagtacgtggcagatgtgaacgagtccaacgtgtacgtggtgacgcagggccgcaagctctacgggatgcccactgacttcggtttctgtgtcaaggtgaagacctggccaggcctggcccctggcctggggaagcaggaactgctcaggcccctggatcctgcccggggcttctgagccccaattcagacacctagactcctctccctgcaccctggcctgctggaaactcctggattcagctctgctatgtggagcaggggcagacatgtggtcctaaaggcagatatgggaccagtcaatttcctctctctgcagcccaacaagcttcgaaatggccacaaggggcttcggatcttctgcagtgaagatgagcagagccgcacctgctggctggctgccttccgcctcttcaaggtgagaccctgggagtggcatggggggctggcctggccagagggatccccagctctgccctcaggaagtctcaggaatgaggagggcatcacagccttgctctctgataacccccagtccaagcctgaagttataggaagtgcccatcgaaggcagaaacacagccctggtctgggcaagtcctggtctgaggggggcgtcacagccacgcccccaggacctctcgacctcaagctctctttctctccccacccccagtacggggtgcagctgtacaagaattaccagcaggcacagtctcgccatctgcatccatcttgtttgggctccccacccttggtgagtgtgcccaaggggatgggagggtgggtatgcaggccctgtcttacgggtacctgggccctgttctgacctctctcctctccttccatctccagagaagtgcctcagataataccctggtggccatggacttctctggccatgctgggcgtgtcattgagaacccccgggaggctctgagtgtggccctggaggaggcccaggcctggagggtgaggcctgctgtgtgtgtgtgtgtttgtgctggggacccactctctgggtgggatccctgaaataggagggaggaagagagggcggggggaggcccctggctgggaagaagtgctctaccttcctgaggtgctgggtaatgcccccaagcacgccccgactctcccgtatctcccactgctccacagaagaagacaaaccaccgcctcagcctgcccatgccagcctccggcacgagcctcagtgcaggtgggtgacggccccgagtcctggggcgggggctgcctcaacttctctttgtattcccagtggggagtagatggtataggggtcccctccccaaagtgaccgcccatgtccttccccaccacagccatccaccgcacccaactctggttccacgggcgcatttcccgtgaggagagccagcggcttattggacagcagggcttggtagacgggtaaggggcagggccgggcaacagacccagggataagagagactggggtccaggtggcagccatggtccttgggtagtaatgctgccccatctcctgtcttctggcagcctgttcctggtccgggagagtcagcggaacccccagggctttgtcctctctttgtgccacctgcagaaagtgaagcattatctcatcctgccggtgagcttccctgcgtccccggagtcctgcaatgagacacaggactcccagcaacctgtcctcctcaccaggcccctccagaggctccctggcccccagtgcgtctcccttttccctgcacaagaagtgggaggctgagtgcggtggctcacacctgtaatcccagcacttaggacggccaaggtgggagaatggcttgagcccaggagttcgagaccagcctgggcaacacagggagaccccatctctacaaataatttaaaaatgagccaggcatggtggtgcacacctgtagtccagctactcaggaggctgaggtgggagcattgcttgagcccagagggtcaaggctgcagtgagccatggtggcaccaccacactccagcctggatgacacagtgagaaaactgtctcaaaaaaaaaaaaagaaagaaaaagaaaaagaaaaaagaaaagaataaaaggaaatggtggggccctggcccaggagggagcttcccaagcctcgggcccctccctgaacttccaccccctttactgtaccccagagcgaggaggagggccgcctgtacttcagcatggatgatggccagacccgcttcactgacctgctgcagctcgtggagttccaccagctgaaccgcggcatcctgccgtgcttgctgcgccattgctgcacgcgggtggccctctgaccaggccgtggactggctcatgcctcagcccgccttcaggctgcccgccgcccctccacccatccagtggactctggggcgcggccacaggggacgggatgaggagcgggagggttccgccactccagttttctcctctgcttctttgcctccctcagatagaaaacagcccccactccagtccactcctgacccctctcctcaagggaaggccttgggtggccccctctccttctcctagctctggaggtgctgctctagggcagggaattatgggagaagtgggggcagcccaggcggtttcacgccccacactttgtacagaccgagaggccagttgatctgctctgttttatactagtgacaataaagattattttttgatacacctatgagttctgtctggcaaggcctggctggctgaatcaagaagggaaccagagctggacgtggtggctcatgcctgtaatcccagcactttgggaggccaaggtaggagaattgcttgagtccaggagtttgagaccagcctgggcaacatggcaagaccctgtccctacaaaaaataaaaaaatgagccgggcatggtggtgtgcacctgtagtcccagcttctcaggaggctgaggtgggaggatcccttgttccttgagcctgggatgtcaaggttgcagtgaactgagattgtgccgctgcactcagcctgagtgacagagtgagaccctgtctggaaaaaaaaagaggggagacctggagaggtgggcacctgtggaggccttggtggaagtgtcaaatggatcgaggccatgtctcagcctgcctggatgttcctcaagggcaggagtggttatctgagagtctccagtgcccaccatgcagcttgacacatagtaggcgcccagtcattgctaattaagtaagtgaatagacaagagaccatcatcccagagagattttctgacagtctaagtctagagaggtaattaacagggcctgggagttggagatgagtccgacagcatgcttgtcctccgctagtcctggactagctgacggatagttggccccagcatgcacacagttatgcatccagccccaccaccaagacacagaatggcctcatcacccccaacaagtccctgtgccccctactatcagccatgctccctcctacccaaactgaaacctcctttctgtcctagttctgccccttccagaaagccatataaatggagcctgctagcattcagccctctgcatctggcttccatctccaacacatccttcagcacccagagtgatcttttctcaaatataaattcaccactcccggcagggcactgtggctcacacctgtaatcccagcactttgggaggccgaggcgggcggatcacgaggtcaggagtttgagaccagcctggccaacatggcaaaaccccatctctactaaaaatacaaaaattagctgggcatggtggcgggcacctgtaatcccagctactagggaggctgaggcaggagaatagcttgaaccggggaggcagaggttgcagtgagccaagatcatgccattgcactccagcctgggcaacaagagcaagactcagtcttaaaaaaaaagacagatgtctggcctctgcccactgctcatgccagtctatgtttttgtcttagaggtttttttgttttgttttttgagatggagtctcactctgttgcgcaagctggaatgcagtggcacgatctcagctcactacaacctccttctcctgggttcaagcgattctcttgcctcatcctcccaagtaactgggattacaggcgcttgccaccacgcctggctaattttttgtatttgtggtagagacggggtttcaccatgttggccagcctggccttgaactcctgacctcaagtgatccactcaccttggcctcccaaagtgctgggattacacacccaagccactgcgcctggccttgtctaagagttttttagtttgagctcttacctgatgggagctctttaataaatatgtcagatcgactgcatctgaacttgctgcttaactcaggagacagaccctcctgcagacctgtgaaccccaactagtcattgtttttgtcaaaacaccaaacctgaatctgattccttggattcaacaactagtttacgggaaatacaagggaaacaatgacaaaaatccagattgggaaattctacagaacagataacccagtttcttcttcaacagcaacaaaattaccagaaaagatgggcaatctctagatttcaagaaatttagacatatatcaaccaaatgatgtgttgacctttgattcaaatgcaaactaactgtaaaaagcatttatgagcaattgggggaaatttgaattctgatcagatattcgatgatattaagggattatggctaactttctaaggtgtaataatggtattgcagttacggttttttctaaatctttatctttaagaaattcattatgaagtatttaaaggtgaaatcacatgatgtctcagctttgtttttattccttttcttttttttttttccaacttttattttagattcagggagtacatgtgcaggtttattacctgggtatattgagtaatgctgaagctttgtttttaaaataacccagaggtggccaggcacagtgggtcatgcctgtaatcccagtactttgggagctgaggtgggaggagtttgagaccagcctgggcaacatagtgaggccctctctacaaaaataaaaaataaaaaattagccaggtgtggtgacatgcatctgtggtcccagctacctgggaggctggggtgaaaggatcgtttgagcccaggaagtcaaggctggtgtgagccatgattgcatctctgcactccagcctgggccacagaacatgaccttgtctcaaaaaataaaaagaaaaaaatgaaatccagaggttaaaggagagggtgtgggcatagtcatggtgtggccatgagttgacactggctgttgatattggttgaagcttggtgacaggtactggctatgtggggatttgttaaattatcctctccacctttgtatatgcttggatattctattatatattgatatattttaatggagagccccttctcaaatctttgggactgactgggcaggaggtggtgagacgctgttttgtaggtgaggaaactgacggcccagtgggcagcctggccccagatcacagtgggagagccaagattccaacccaggtctgaggaccaggtctgggcatgttctgcttcccctgtctggctgacgtccaggtggcattcctcagccacagtgacagcaatagtggcctactggggtcctcccttagagagcccctcccttccctgcagccttggtctctggcctggagggttgtcctgaggtgaccttgagactgtgcagcctctgcaatcagcccctgggctgggtctggcagccctggcagccactcccgaccaaggcacccccatccttggctaactccaggctgggaagctgggaccaggtccagcagacagaggtgggcagagaggtctcatgcacaccccagcctgggacctcctgggaatctgctggaagaacttactgcagcccaagggcaggaagggtggcagattttgcttctttttagcaggactggaggcaggacccagtgcaacctgctgcctgccacctgccacggttcccagagccatccccaccacaggctgtggctcgagcaccgaacagggcagtgtcagctgtgtggctggccatgggtgcccagggccacctccgaggtgtgggtgccagagttccaggctggagtgagagtaaaggggtcaagatgagtcacctcttcagcatgtccaggggttcagactgtaaaaaaagaggacccagtgtcccttcacagcctgaggcactgggcagagacaaagcctctctgtcaatcagctaattggagactgtgagacagatgtccttcccactttacaaatgggaaactgaggctcagggaaagacagggactcacctgcgacaggggtcgcagagggagttcgggacagaggccagactcagcccactggacaggtggtgaaatgcagccctgccctgctctagcctttgttctctgccccctcccttctcagtgctggccacagtgagggacctaggctgccgagagcccttagagggggcagcatttggccctgatctggccacctgagaccagcagcagcccattcttggtgagtgtctgagatttctggctttttggagacgtagctgctaagagtttgggggcacagggaccctctcagggccagctcacagtggaacccctgggtaagatcccccagctctgaggatgtgggaaggatgctgctctacctcagagactgcagcatgacctacagtggtcagacagcagaaaggactgccaaggacggctgcagtgctagatcggggaggcttgtggttctgagaaaatctgggctggtgggaggggaagcaggggcttctctgggggagagggtgggggctgggacctcagatactgtcttttcaaaattgatttattgggtttcattctaaaattatacgtacttattaaaaacatttcagaaaaaaacttgagggcaaaggggaaattcctcatcatctttccatgcagaggaggacccagtactgagagagggtgacagggcccacatctggggagctgacgcgaagtgctgcctgccatgcatcacacgttccagcttcccgggaccagcgtggccggtgggagccgggtgccagggcacattgctatccttggcagcaccatgggcctttagggtaggggttctgtggagggtgtggctacaatgttggcctccctgcctgctcaagtgtggaggggagggaggactgctgccaacgctctggactctgggatgggggtgggcatgattccaggggagcccacctccctgggcggggcatccagacaaagccctggccagttctgcaacatccaagttcacgggtggtggacaggcccaagggttcaacatcaggtcagggaccctgcctggctccttccttgggccccagtgccaggcaccctgatgagggatgaagagaggaaggacaggacacagacaggggagcccaaagccacttggaaggattctttcttccaaactatccacataagcagttttctaactccttcccagagcccaagggttctggcaggggcttgaggggcaggttggggtggtgatgggggatgcattgcctttctatctggaacttgagccttatggtatattcaggaaaaaggcttgaaccagtgaagtactgatctggtccaacagatagaaagagggcccagagaggtcagggcttggtccaactcgcacagtggtggggcgtctgcagactgctttcctgtcctgtgctgttggcagaacctcagctttgggacttgagggggagtatgcagtggcaattaggacaaacgactctgagctctcagttgagttgggggaggagagaaaagaaggagttagatcctgggggagttggatgttgcagactggactccagagcctgggggtgtgggcgatcctggggtgtggggagggcgggctgaggctgctccacaagcgttctcgaagttcaccatacaagaaggggcggtgtggggaaatggggatgaggcctgaaattcaatcccatgtgggttgagttatgatgtcatctgacaccctctcacacggctgcatctaccccaaggaaggggcaagtttttctttgatgggcacctgggggggctgtttagctggagttttttttgtttcgctttttttgtttttgtgttttttttgagacaagtttcgctctgtggcccaggctggagtgcaatggtgtgatctcggtttaccgcaacctccacctcctgggttcaagcaattctcctgcctcagcctcccaagtagctgggattacagacatgcaccaccacgcccagcaattttgtatttttagtagagatggggtttatccacgttggtgaagctcgtctcgaactcccgacttcatgtgatccgcccgcctcagcctcccaaagtgctgggattacaggtgtgagccaccgcgccgggcctggagctgcatttttgttgtaagcactttgttcttacttggattaggtttattttagggtggtttggggcagactgagggagattggaaggcagaaaccaccccctcaggacaaccacgtggatctccttagggtctgggtagtggaactgggccctgtgaccttggagttggaggggaagctgtaagcagggatggaacgggccacccgcaccctcacacagctgtgaccaacaggcacggtcatccgcattcacctgcccaactcccatgccctgagtcctgtcctccagggcattcctactggcactaccccaatttcccaaaagattccagggatctctctctcgctctctctttttttttttttacagtctcactctgttgcccaggctggagtgcagtggctgatctcagctcactgcaacctccaccccctgggttcaagcgattttcctgcctcagcctcttgagtagtttgggattacaggcgtgcgccaccacgcccagctaatttttgtatttttagtagacggggttttgccatgttggccagactgatctcaaactcctgacctcaagtgatcctcccgctttggcctcccaagggagggttccttcctcccaggctgaggcaccctgccccacacatctactggaggaacttagtgttggggccagggggtggctgggtaaggctggatcccacacttgtcaggccaggttggggtaggggaggatacacgggggacccgtctctcagccgttctgggccggtgcctgaggcgatctgccccgccgcccgcccttccgccaccacccaagtcgcatgcgcgcgccggggccgacgggcgccaggctccaccgagccaccctccgtcgtggcggcccctcgtgcctctgcggagggaaggccgccggcttcgccagggggcgcgcgtcggggtcgcggctctttgaactcggccccacgaggggacgcgccatcggtttcgtggcttgcgtggcgccgcagcaacgagccggtcgccccggggcgttgcttagtccgggcctcgctgcgagtctgtgggcgaggcgggaggtgcttccttggccaggcgggtggaggaaggtgtgggcgccgcatcccagcgtcgcggagcctccaggcgcgggcaggcgagactggcgtgcagcgcgacggcctagtcccggcgtcccaccgtcccccactcccgcaggcgccgagccgattcagccgcgcggctgcagtgacacccagcggccgtcgcgggaagtgcggtcgccgcggccaggcctccggggctcctgtctctcgaggttcccaccccggttacgcgcgggcaccccggaggagagcggccgcgcgctgcagatgcccgcgggggcacttcccctgcccctcccccgtttcctccccgcaggcgcccgagcgccgggagatcctgcgcagcggcagtgcccggaagggcggggcggggtgcagcagcggcgctgggctgtgacccgggcagtttcacttctggatcctgctcgggctgtgataggacagcgcgggggcagcgggggaacacgcgggcacgccgagatccggcgctcgggaccccgatgaggggaggcctttcactcctggggtgtcacgcgacccacgctttcctccatgtccactcccaccccccatgggttccactttgctgtcccccgagctgccgctcctccccagcagacaccgtctccgccggggctgccgacccccggagaggccccgagcggcgtgggcggcgggaggagggagctgtgaagccgcaggcagggggttaggctgcgggctgctgagacgccgagctgtttctcagaagtgcagctgcccctcccctcacacccccctcactcccaccgcgcgccgcacccctgccccctctccgccggcctccctttcctctcccaggcaccctagccgggaatctggggtctgggtccacgcagaattaagaggagaacctgagaaagggcgggggccgggggttcagacccagcctcagcgcgcgttattccgagcctcctataattccacaggtgaggggatcctgtcccctacccctggggtccaggattggaatttgatagaacagttaggaaaatgacatcttgagagagtcagggcccggccactattactctagctccagcgtccagtgaggagaggagagagagggaagacctggagcccggctggtgcagtgaggttgaggcctgtcttaggagtaccagctggaaggcccttcagagatccctgactctggggaaaatcaacgcccagaaggggaagtcaagtgtctgggctcatcccgagagggagagggctgggattggaaccaggactccaaatagttgcgggagtctgcgactgtcttttgcttgggacttcagagctttgctggattcactgactcagcctgctttccctcaacacacacaaacacacacacacgagacacgtgcacgcgcgcacacacacagatacacagacacacacagacagacatgcaaggagagagacaggcacacatggagacagacacgcacacgcaaagagacacacagctccccaggagtctagcggggcagctgaggtctgtgagtgagacattctcagtgagacactgagaatgcaattccagtgggggtgggatggggattgggcggtggaaggacaagcccgggggaggaggtggcatcgcccccctagttcccatccaccaccacccccagtgctgtggtttatttgcctaggcagctcttctgggccagggggccagggtactggggtggagaggcgaggtgatgggaaaggctgttctggggcttcctgccccctcactcctggggaaggggggtagctgccatcacccgcaggcctttccactgcagccctttccttgggtatgtgtgttattctgggggaagatctgttatttgcggagaagggaggcagctgcctacttcacaggtcaagacagagttaaaaacaaaaccacagcaaattcaacaccccgtgtccttcagggactttccatgacaccttccttcccccctctcccctaagccagggagcacctccccagagggcctccccaccccaggtgcagtggcttttggcttttatgcaaacaactgtctgatcccggaatgctccacagcccgaactgtggcctgggccgaatgtgcccctccaccatcccttgggccagtgtttctggtcttcctggagttgtgacctccactcttcctcagaccctggattctgagggacaggagatgagggcaggaagctaggtcctttccccctgcctgccctcgggtggcagttgcctgcaggtggagggtttgggcacagcaacctaagtgaatggtccggggttttgagtgatgggggaggggaagaaggagggtgcaggtgtggggtggcctccactgccaggcccaccaccctctagggcattgaattagctcccaagatcaggaaggaaaactcttctcaggctgggagtccattcaaccccaacgccagtgtggacctccggtcctgctcactggcaaagggggtcaggatctccctgtctccctctcttctgcctgagctgcttctgctttggggagggatttggggatggggaaggccatataatcttctctccagggctgaaaaccagctactgaggggccgtttttgaatgtattcagtgctaaaatgcaaaggcagggtgccatgccattcctttctcctcctcagcttgagcaagactgggaaacctgtaggagaccctcagccagtttgaacattttggagtgctgatgggagggagatgatgctgatcatggagccagaggacgctggtgccagcctagccccacatttgttagtcttaaaacttcagacaatctttctcatgcctcttccacagaagacggaaaatggagggtgctttagatgaggctgagcagaaggccagactctctctctactttctctaacgttttctaagagagaacacaatgatgatggaaagaaagcagcctcatccctatgccattctcctaggacttttccccctaacaccttcggtttgggtctccaggtatctaaaaactgtatttaaatatggtcgagtttaaggactgcaactcaagtttcccaatgtggatgtctgtgagcccccacacatgaaaaagtcagaacttgactgtattttaagaagaatctctgttgagggaggaaggcagagcagtgacttggaataggggtgcaccatgctgaatgtgctgatcatgctaagtccaggtcctcaacctcctccagtttccttagtgaactaaggaccagtggaaccaggaaccctatcttgtgggttacaggggccagcagcaggatcacagtggtaggctcagcaaggcgtcaggtgagaacctttatttcagtgataattcatttttcttgataactggactttaagaaatagaggggcaaaattaagaaagtattccttggggcgggatgaaacccttctacatcctgacaccagcagacacaaatcataagtgataaggatgcacaaggactaatttcaaacataccaggatttttttatttttcagtgtaaaaatcaaacatgataaacctagaaaactatcagcagggctatttcttacagggttccagcaagggttagcattgttacatttcagaagctgactttctttaaaccatctttacagaggagtaaacttcacagttccacacatggctgggctccaggtagaactccataggagtgacgagggaaagtcaccactgggcagggagggcatttctgagaaatgcagatgagaggagaggctgtgagcacaggctgtgtcaaaacccagggcaagggctccctcccgccttccctcccagtgggaaggccaccctgagccccaaaccacattctgttccttcctcgtcattctgcagacaatggtcatccacagaccacacgtgtggtggctttggcaaccagaaatttaaaataagctatggtttttccagtagccaaaatgatcctgcaccaaagctcatagactgagaacctgagcatgcaaaaccacagtctgggtgaagggatgtctgctttgtaaatgacctgctaattctttgcaacccacagtaatttggtttctgtgaacccacagaagcaggcccaccaaaaagggccttgtctgctagcctggagtatacatgagtcactggcggtgggatcagtcattttttaggctgccccattttcctaacatgttaaaatgtgtgttctcagtcttttcaagagaggaagaagcaaagcggcacttacagagtgtgagatagacacagatctgtggcgagggattggggaaggtgggtggcatcttgggactctctccaggctttctggagtggggtcagtggagagatgaacagtgagaaacatttgaaataactcaagttttggagcagcggggggtggggtactaatggctgaggactcacagacagtgagggagcaaagcgctttgacttccctgggtgcgacaccatgaagtgtctatagcacgtggttagctcacgctggttccaagggtcagcagatcctctgcccttgtgcattaaaacaacatgaaggaaactgttagagatcagttacctccataattcatttgtaaaggaattgctattatgatctagtatgatcttgggatatttttcatgtctttaaatttaggacacggtacattttccactgaaaatttacaatcatccaacataatgcacaccacccctcaaaggtaacattagctcatatacaaaatcatggaaaacctcacaacatccttggaaggtagatattgttatatccttacaaaaatttaatacacccattaacattcctatttcaaatagctcaatcgatatcaacacataagacagcccacaattgtgatacagtattaagaagaaactcaggccagccgcggtgcctcacgcctgtaaccccaacactttgggaggctgaggtgggcagattacttgagcccaggagttcaggaccagcctgggcaacatggtgagaccctgtctctacaaaaagtacaaaaattagctgggtgtggtgacccacgcctgtagtctcagctagttgggaggctaagacgggaggatggctcgttgcttgagcccaggaggttgaggcggcaagtaagccttgattgtgccactgcactcagcctggggaaacagagcgagactttgtctcaaaaagaaaaaaaaaaagaggaaacttgtatccaatttattcaaactgcaaaaccctgtgtatcttcataacaatggtggggcaaagactatctacagctggggcaagggagaggcacagtcttgtgttactttacaagctctcagaagtttaaagcccacaattgtccttcaggctcttctgagtccatggtcctaaagggtcaggagtcctgaaccctggcttattctcagaaccattcagtcgtgctgccttggagaacagagtccttttcctgaggtggcccaggtccagctgctggtttcagatcaaaattgacctccttcatcggcacttatatctcaaatcattctccttgtctgaactctggatatagaggttttttgaactatactttctgtgtgaacacaaaaatagcttcccattctctaaaagatgaggtatcactatatatcgggtttttttcttctgttcctggtgctaacttttaggacaaagtttcaccactcccttttctcttcttgagctcacaagtcccgatgctgactctttgagtcctcagatagccaggctctttcacatcttgagtgtcccagagtttccaaatctctgctagagtccaacatacctcttctcagtggggtactctttaaagtgaggacttaaacatttccattgtggtcttatcacctgggattatatgtaacagtactatttttttccttaaaacattctttttttttttttttttgagatggagtctcactctgttgtccaggctggattgcaatggcgcgatctcggctcactgcaacctccacctcccaggttcaagcaattctcctgcgtcagcctcccgagtagctgggattacaggtgtgcaccaccacacccagctaatttttgtattttttttttcgagatggagtctcactctgtcacccaggctggagtgcaatggcacgatctcggctcaccacaacctcctcctcctgggttcaagcgattctcctgcctcagcctcctaagtagctgggattacaggcatgtgccaccacgcctggctaattttgtatttttagtagagacagggtttctccatgttggtcaggctggtctcgaactcccaaactcaggtgatccgcccgccttggcctcccaaagtgctgggattacaggcgtgagccaccgcacctgaccctccttaaaacattctaaacctcacattcagtagggcttggggaggtgggggtggtacaggaaataggagaataatagtgatacagatgctacctggaaaaactttgttctgtctgttcctcacgaaacaaagccgaaaagaaaaactttatgtggatgtgagatttgatagtaacacagtgtttcacctgagcaaaattttgtgtttttaaacatttctgtttgccaaagaaatctgaggttgtggctgggcgcagtggctcttgcctgtagttccagcactttgggaggctgaggtgggcagattgcttgagcccaggattttgagactagcctgggcagtatggcgaaacgccatctctgcagaaaaatacaaaaaaaattagctgtgcatggtggtgtgcctatagtcccagctacttgggaggctgaggtaggaggattgtttgagcctaggagatcaaaatctgaggtcattttatatctggccgattttgagtatgggcctaacaaaatgttaagcactgcatttaaaaggtgagaaattttgtcactgacaaagtcagaagctgtgtcaggaacagctcacagtgggtcataaagcataagattagctggcttatctgtgccaaggcgaatgtctttttgggagaataacttgaggaaactaaagactgatgagttcattttctctcttttttttttctggtggtagtggtgggggctcacgggagagacacttctatttagttttctttccgtaggaagtaccgatgcaacacttcaggtagtgacagaaaacatttggagagctgggcattgtttgtgcatgcctgtaatcccagctacttgggaggctgaggcaggattgcttgagcacaggagtttgagtctggcctaggcaacatagtgagaccctggtcctctaaaatatacatacatatatatacatatacaaaaaaaataaaaataaattaaaaaattaaaaaacacctggagcactggttctgtttcttttccaccctcagcccagttctgtcaccttggctgcaaggaaactttgcctgggtttttttgtttgtttgtttgtttttgttttagacagagtttcgctcttgttgccgaggctggagtgcagtggtgccatctcggctcaccgcaacctccgcctcccgggttcaagcgattctcctgcctcagcctcctgagtagctgggattacaggcatgtgccatcacgcccggctaattttgtatttttagtagagatgggggtttctccatgttggtcaggcaggtctcgaactcccaacctcaggtgatctgcctgccccagcctcccaaagtgctggcattacaggcgtgagctatcgcgcccggccctttgcatgggtttggttgttcctcagaccgtggcctcctgggtgtatggtggaaagcccgcctgataagaggctggtgggaaatgaaggagaggggcctacaaggctcttgttcagagggagtctgcatgagaaagtacaggtactatctgaagctgctccagggcttcagtgcccagcagtggcagatgcaagtcctgactctgcccttctgctaagattctccttcaccctcacctccccagccctggcaaggggtttgttaattagtacagcataaggggtatgtacagaaggcagcgtttatctgtgtgatggtaaccactgcatatctggttcaacttcaagacttaaggatgcagagtttccacacataaattttttctggaattgatgggccccaatctaggctcagaatgccacaaagaaagtgcctttgtgagtggtcaccttactcagaaaactaacctcagaagaatagaaatcatgcagcaaattcattagtcacaggaaaaaggaggatcatatctataaaaagagtccccaggctggtggaatgggccttggtttcacaatcttgagatgcaaaaggtggtctcaggctgggtgcggtagctcatgcctgtaatcccagcactgtgggaggccaaggcgggcagatcacctgaggtcaggagtttgagactggcctggccaacatggtgaaaccttgtctctactaaaaatacaaaaattagccgggcttggtggtgagcacctgtaatcccagctacttgggaggctgaggcaggagaattgcttgaacccgggaggcggaggttgccgtgagccgagatcgcgccactgcactccagcctgggcaacagagcgagagactgtctcaaaacaaaagaaaacaaaaaaagttggtctcctctgcaaagacttgaacactaatctggtggaaaggcttcctttccctcgttttctcttctactaatccctgcttccaaattctctttctcttgtcccttgaagaaccaacaggatgtgcgatatttcaagaacgtaatgagcaactcctctttcacaaagggaataagcaatctggcatagcttggagtctagtattacggaaatacagtgatatactgaagactacacaccaaaatacatccattcctttagctgaagtctcaaacatgttgggactgttgccatggaatttcataaaaccttttttcctgagacagacgccatgccacaaagaaggataagccatttgtgcagtctgaggtggaacattttaattactggcagcacatagacgagttgagttggagccgaatgcataagccccttagaaataaaacactaatctaccaggaatttgggattcttggctctggtagaaatgttacaaattaagctgactcttaatttgtaaataggctccatgaagttgtccctggaagcagaatttattttccctaacataatttcttaaaaagtaaaaaaaaaaagaaggctttggcaaacagctgcatgtgccaatttgtgtgtatgctttgtggcaagatcaaaatacctttctgttttttgttcctctccaccaccttcttcacattcacaactcagtggttaaaggaaaaacttaacacaccattttcataccaaaggaatgtgaaacatgtattcatataaatactcttctgcttaatatccatacattaggaggtttaaaaaataccttgtggttactgcataatcacatatgaattaaagctagaagggacctaagagaacattgaaatctaattcctattttatggatgaggaaactgagttttttttgtttttgtttgtttgtttttgttttgttttgtttgagacagggtctcactctgtcgcccagactggagtgcagtagtgtgatctccactcaccgcaacctcaacctcccaggcttaagcgatttttctgcctcagcctccggagtagctgggattacaggcatgtgccactactgcccagctaatttttgtatttttagtagagacagggtttcaccatgtgggtcaggctggtctcgaactcctgacctcaaatgatgcgcctgcctcggcttcccaaagtgttgggattacaggtgtgagccaccgagcctggccggaaactgagttttaagagttaaataaggctgggtgtggtggctcacacctgtaatcccagcactttaggaggctgaggcgggctgattgcttgagcccaggagttcaagaccagcatgggcaacatagtgagacccctatctctacaaaaagaacaaaatgtagccagacatggtggtgtgcacttgttgtcccagtactcaagaggctgaggtgggaggatcacctgagcctggggaggtcgaggctgcactgagccatgattgcaccactgcactccagcctgggcaacagagtgagatcctgtctcaaaaaaaaaaaaaaaaaaaaagttaaacgatttctcaaagtcacatagctaattagccagcattttgtgacctcctattccagtgctaattttaccatgataacagcactcctcctgatagtatgtacatattatgagtgacaaggatgacttatacatctgcagaaccgtgatcagactttcaggaattttcatggaatacagcagttccatttaaatgggaaaaaaagggccgaagcctgcctgatcaaggagaacctctcaatagaggtgtccctcctcaccccattccggagctcaactccgatctaaacacacatgccatctatctccaattcctctcctgtggggagggggaggctgagccatactttttggactttttttgtggaaaatatcattggcaaatttgctttgggtctgtatcaccaattctccatgaactctttcaagaagttttaggtagctgttttttgtttgtttgttttctgttggtgctgccaaacaatttccccctttatacccttgctctgccaaccttgaccaaaggaaagcgatgtcatcatccacagtggataaatttctggagtttcgatgatggtctatatttaaaaccatgagttcttctggcatagattttcttctatagacaactggtttagcccaaagcagctcagcttttcactggagatgggaaggtaaaggacagaagcagaagtgccatcagatgacattttttaaaaatgttgtgataggaaatggatctgatgcttggagaatggggtcttcagttactcgtaacagatacttattttatggctgttcttttacttactcttagactgtcatttagattagggagattagatcttaacccttcagcctgtgaagggcagaagggtgaggcttcccagcaaggtcagctggtcagctcttcctctttgtggatttgcatgtatgactgaaaggcttttccacgtgtggttgatatatctcagaaagaatgtttcatatagcacatctccgggaccactcattccactgctgtagaagataatgaccaaatacctttttggcttttaaattccataaaattcaagtccctgatgggaaaacaaaggtttcacaaaagtaataatatgctagacctgcgaataatttctgaaggaagacagtgtttccctggctacccctgtgaacacagctaaaaatggtatgaaaagaagtttggaactgagtatgttttgagagcaatctgttaggcgaggtcattggtttttagaaacgatgctgaatacataggagcaatccctgagaccagatattcacttcagcagggctctgtgttctcctctggctatgtgagacgagaactcataccgatcatggcttcgatatccacacatgttacactcgaaagggtcacggaagccgtggcagcccatgtgaatcgtgaacatcacatagtccaggaagaggacgcggcagtggtcacaccgatacacatccatcacctccccttccttgttgatcactttgacggagtctcttgggcagatgggcgggggcttgaggagttcgtaagagcggggaacctccttcagaagtggcatcccattgcgggcccgagacaggaccatgtgattttgctgatagatgtgattctggcgttcttcatggttgctgtcagtgtccgtggagtcgtggccactattgttgggagagaggcctctctcagaaggcacgctcttctctggaaggtggatgcttttcttttccagctcttgaggggcaccgtttgacatctcagcccgggtgagggctatgggatacatgctgctgataactggaaccatctccgaggtgggagcaggcggtgtctggaccaaggggcgcagggcttcggcgccaagatagctgatggcgttattgatggcttggtccatcatgcgggtctgtatgagctcactctctttctcatacatgtaacttgaattatagttgacatcaaagcagtggcgcttctcacctggaacaagtgacagaaagggttacaaagggaacactgccaaggcagagagtttgtaaatattttctagagacctcaaaaagggaggagagttaagttgcctgctgctcaagaagaccaagcctggcagaatggtttcccatggtgctgtctcaggggacactggtcggcagcaacgtgtttggatggttaaaataaagccagcaggcagaagagaggggcagagatgtggttcagttgaggccacatggtaaggtatgcccactgtgcatgttagaggagagccctcaagaaaggagggaaagaagcaggacactaggatggggctagagggacaagggagccaccagcccacaggagcctgggacttctgctatagttcatgatctcttaagacacagtcggctcccaactcttattttgcttttgcttgttattttctgcttgcaatattaggtagccagggggacagaagtgctgcaaagagtggggacactcggtgcctcacctcggcagctttttaaatagctacagagatagagaaaatagccccccagactccaactggctactccccaaactcacccgtcctggctgactgagactgaagtgaaagagcttcaaatgtagaaagtttgagaaaagttttcttgagaagagatcatggtctttgtccctttcctaacgtgtgtttctcttcctttgcttggcaagtgtatctctgatacacatgtgatcattagggcctatctcacacttaactgaaaaaatatacttgtggtcaccctctcctacttctcatgtcaaactgctgagaagttttgaaaacagagtttagccaccttcagagtgtgtgggtgttgtgtgttagaaaacagaggctctctggtcacagggaaggcagggatggggactgcagtgagggcagatgtgctcagtggtgagtggtggggagaggggagagaaagcgaggaagtggagccgagtgctggaggtgaggctgaggtcactgttgagcctctccattctgtcagcttggatcctggagggatttgctaaaccatatccttctataatgtttcctagtcatgttgagattccaaaatttgtcactgccctacagtaaagggttcagcaatgaaaataaagaagaagaagaaaaaatgccatgagaaaacaaaaggattggaagaaccagttcctgttcttgaggtgtctccaacctagtggatgagaaataagacctatatatatatagaactcgagaaaaagtataagttaaaagttggccgggcgcggtggctcaggcctgtaatcctagcactttgggaggctgaggagggaggatcacttgagcccaggagttcgagaccagcccgggcaacatggaggaaccttgtctctacaaaaaaatacaaaaattagccaggcatctgtagtcccagctactcaggaggctgaggtgggaggatcacctgagcctgggaggcagagattgtagtgagctgagatggcaccactgcactccagcctgggtggcagagtaagaccttgtctcaaaaaaaaaagttgtaaaaggactgctttgctctatggaggtctttgcttttattctaaatgcccacatttgaggcatttaggcagggaagtaacgtgttctttaaaaagaataataaggtaacatacaggcatcggtgagacaatttggtataaattgtatatttaggcattaagggaatgcagaaacttcagaagtacttggggaagggaaagcattcttggaaaatctaaattttgagaagggtcttgaactggaagaatttagattttcagagaagcgggagaggacatcctagttgagggggagtgcaggaatgaaggcagagaggtgggactacacgggacgtgtgcagaaagcgagtctggctgaaacgcgatcaagaagtatgaaatacagtatttctcaggcttcactcttccttcacattctgcaatatccacacaccagggcagtgtggtggttgagagaataaactctggtgtcagatgggctgggtttgatgctggctccattggtcaccagttttgtgaccttgggcaagtcacttaacctatgttccgtgtcctcatgtaaagtgaagataattgtatgtacctcacagggtcactggaaagcacttagaacagggcctgccacatggaaaacacttggtaaatgcttgggtttttttcctctgtttgatttggttcacattttctttctttttttctttttctaaaataaatgtggtttttaaggaaactttatatcactaacataaacggaaaaccagaatcactttccacaagtagaaggtaactatgaaaaataaagacaatgaaacagagcatttcattaaattttgatcggatactactgtgagtacttggagactaagatcccttccccctttgttaaaaacagagattaccaagtgtgagattagtgttaaagacaactggcatcaaattaagtctaaatttttctccttagtatgatccaggagactgaaagagaactggaaagaaaataattatcctgctgtgtggacccaggtttttaaatgctccatgtgcttgctggcaatttgcatcctacatttggggaaacactgaaaaaagataatgcatggtaggaccgaatggtgggcattccgaatggcccactgtagggtgtgaatccgaaccaagagccaaggctacctgcccttgagaaagacaggtttgtggttaacgtaacagcaatgtgtaaggcagaccagaacagtgagaaattggagccagaagaaccagctaaaagatctattcccatgagatgaatttgtctttgcatccccacaagcagctgaccttaaggccaacctgatagtttccagagaaatacctgagagagaaaaaaaatatgcaaacgaaaataccctgtcttggaaactcaatgagaagcaacagcagagtagaccttggccaaagtaatcaatgttttttattttcagtttccagattggatatatctttggtcaaggccatctggaagactgagaacatgagagccagctaaggtcacagacattcattccctagaatgtgacacagaaatgatgaacttcggtttcttggcctttttaaggttattggttattttccactgtggccacctctattcatctccctaaataccaggggtccttgagaaactttttctcttttcacccaacagagaggctccagaaggtttctgggtggggtaggcacatcacaaactctgattttatcctttctcctaagagtttgctttacttaacaaggcctacaatttcacaatctataccacctgcagcatatgtcagaaaacagctgagtgctaaaattgtaaaaggcaaaacattaagaggaagataaacccctggatgagtggaaatatgtgactgaattctgtagttaacacagaccattgttcattgttaaggagatggggcagcctcagatgttcacgtgcatgcaacttgcaatcatcagatcccctcgtctctgagttacggtaacttgagcagtgcagatgattatcagtcacctgtagacacgatgactcaatgtgtatgaaacccagaaagggtaaactacagtaattgaaaagccaacagctcacgtttctttagtaacacactcataaaaaaggttagtcaaaccacaaaagtgtaactgcttccaaacctgcacggagcatctggtccagcttctagtcaaaatcacaccacgcctttgaatgattcatgataccagcttcaggctgaattagaggtcttcttccaacaaaaatacacacggcaacagcaagtcctaagtttagaaactaaggctgcctggttgggccattccctacctgtggttctttttaaaggtgtcaatgtcttatatcttggctttgttaactctaaactaagaaaccacctgacctgaactgatgcaatgtggtgaggacatatggttgttggcttctaagtgccaacttggaagtacagaatcacaggctagagctaaaagggcccttaactgagcaagtggattcagaactctgtctgcagggttgagggggaagacccaccaccctaatatgtttacttctggtctttatatttcacagtaccttgcactgtgccttatatacaataatcccaataatgataagtactatttattgagcccctgctgtatccaccgtgccatcctagatactttgcatactgtctcattttaccagcccattaggggttgatactttttttttttttttgagacagagtcttgctctgtcacccaggatggagtgcaatggtacgatctcgactcactgcaacctccgtctcctgggttcaagtgattctcttgcctcagcctcccaagtgtctgggactacaggcacgtgccactatgcctggctaatttttgtatgataccttttaaggtatgaattatcatctcttagatgaagaacctaaagcacaaacagtttgattcactttccaagattgcccagttggtgaacagagaaccaggatgtaatccaagagcccacatatcccagtatatgtttgagtgttaactgatgtttcctggctgctaccttgcccatggctgcacagccccaccaccagcagtgacttcaggttttctgctgtgatggttcccatagcagagggaaagggggcttagtggcagcaactgctttttccacatggaccagcacatgcactcaagaagtatatgctgtgcagagttgttatgatatctataaagtgcttagcagtgccaggcatgtgtaagcactctattcccattatttgcttagcaccatggttaggtgatttgaggaatacaacaaaattgcaatccactagaggagatgcagcatgtacatcatttcatgacaaatcagtatccttaatgctacatggtagaacaaaacatagagtagccaagagagtggaaagagaaaactgaattacttctcaaatatgccacacttaatatggggcaaagattcatctattctttaaagtctccttgaaatcagaggtggtggtagtgacggtggtggagacagtcatatctataataagaagcagactagtaaactcgcctggagtgcagagggaggatggagcagagagagaacacaggggtgtgggaatgtggacaatgtgtgcttctttttattttttatttttgagacaaggtctcactctgttgctcaggtgggattgcagtggcgtgatcacagctcactgcagcctcaacctcctgggctcaagtgatactcccacctcagccccctaagtagctgggaccacaggcccatgccaccacacctggctaggtttttgatttttttttttttttcagagacagagtttcactatgttgcttgggccggtctcaaattcctgagctcaagtgatcctcccaccttggtctcctaaagtgctgggattacaggcatgaggcactgtgcctggcctacaatgtgtattttaagggcagatgtgagggaggccattcagacaagagtgagatattacacagaagagggaggaggagttcattgtggctgaagtaaaggactggttggctgaaatgataaaattagaagaggtaagttgaagacagattgtggagggctcagaaggcctgactgaatggtttagatttgattccactgggagccattgaaaggtttttttgaagaggggggcaaaatgatcgaacctttagaaaaataacagaaatccaatatttagagtcaccatgatggggtaaggtgaaatattcaggtcttaagtcttaaagttcttcaagtcacttaaatgtgtttgctgctgcgtcatataatttcccacaagtgttatccctcactcttactatcagcacacatccaaaagcaaatgaacaaaaaaggcaggaaaatagaatatccaaccatcatcatggctctgatctcaacctaagtgaaactaacacttcttgcaggaggtggaaaacagaggggagccagagaacaagaagaaacaggaaggaggaaagaacagagagagctgtgggggtggcactggggaaagctgagctggagaccacatttggttgctgcagaagtctttgtcctctgtgagacactgggaagtgctgtgtggatgtcatctgttctcatggagtcaccagggaagactgttcttttctaaagagaatcacccttgagggagaacaattgcccttcttcaagggtttttttcctcctatcaattttcttttttgtttttgaaacagagtcttgctctgttgcccaagctggtgcgatctcggcttactgcaacttctgcttcctgggttcaagtgattcttgtgcctcagcctcccaaatagttgggattacaggcacccaccaccacacctggctaatttttgtatttttagtagagatagggtttcaccatattggcccggctggtcttgaactcctgacctcaagtgatccacctgcttaggactcccaaagtggggaattacaggtgtgagccactgcacctggcctctcccaccaactttcaatgaccagactccttgctgtccaaagccccgcgcatgacatgcactgctcttggtcacctcctggggaaggaagggcctggactgcagtgccttataggccgaggtctggcgctgctctgtcacctgccagctgtgtcactccacctctctgatcctccttccttccatggtaaaagagcctcactggtggttcctaatagcccaaaaatactatgacattgtaatgcttacaggattatggacatcaggcctttgggaaggggttggaaaaatacttttttttctcttagaaacaggtattaaaactgcttcctgttgctgttaaccaaagcaggcaatttctcattagttacttcacagggagatccgatggtttgttgaagtgtcaaaacctcattaacatgtttaccacaggtgagtgagatctttttttcatgttcttttcgttatgaaaacttcctttaataaagtaatacataaaacttttaaaataaggagatgctatggtaaccactttggtctgaataacatctgtttttttgggaaagaataaaaatcaggagaaatatgcagaaatgtagtcatttttcttctgcatccaagagagaaatccattttgagccaagtatttgaggatggcctagtttgaagtgtagtcaaacaagtttataacaggagaacaagattcagagaaaggaaatcccctaaaggacagtatgtgcaaaggaaggtcttcttgtcctttgaaaagaacaacttaaacagaattattctgacaatgtaaagatggtgattcctgatggacgtgtgtccatttttttttttcccatttgaaacaaagacatacaaaatttcttggagaattagaaaaaaaaatatttttctccaacttgagagcatgtttgtgtctcaaaatacatttagacttgatccaatctgtccctcttccccagttcatctctaatggatgcaaaatgctccctactggtaattatcgccagcccgcctgagatagcagcgggctgacctgatggtctattttcacctttaccctcacagttcaagaggtcagggaagtcaaggctggtctgagtgctgtgcaactgtcagcaaggattaaagggaatgactcactcttccttcacaccttacccattgccattaccctggcagctgaatcttcaaaaaacagtgccttggagaggaaatataggagaaaggagagaagaggagaagagaagggaggagaggagggaagaggaggggagggaacaagaggacaagagaggagaggtgaggtgaggcgaggcaaggcgaggggagatggagagaaaacagtagccccatgttttacatcacttcatctcatacactgcacagtgtcacaaataatgttcctttctccctccgttgacattactattttctatcacaaaggttgattcaattaaataatttaaggggtttcttttatttttaatttttaaaaacctttcaaacaaaagtttaggatataagttaatgcaagaagattagaacagtgcccaaaacaagaataccatatatatgacaggaactcttaaccttctgtatgatgaatgaatggacaaaaaagtgagtgaacaagtagtactgccctaagtaaaacacatgaatgtcgggctaatgcgactgtgttttagattctcagatttataccatcttcctaaaacaaaaaagactctaaaaacctaggatatggtttatagcataaacaccacatctgtatagccttgagaaaaaggctatctgaagttacgcacatgggctttctaaacacacagtggtatcaataattgctgccttttatttcttttctaattaatctcacagacttgtacatgggaggagacttcctggtcacttcatcacctattcagtctcctcatttcacagatgagtaaagagaggcccagaaaggttctgtgattggtctaaacacacagttaagaaatgacagagctaggatcagaacctgggtcttttagcttctaatccagtactcttcttattgcactacaacacaacttacgaaaaaaaaaaaaaattcccccagttattctgggccctgaagccctgaagttgctacctcaatcaagagctaactctactaggtttctgattccagcacagagagaatgtgatggttcagaagatgagagaaatcaacacctacaagatcagcatctctcacaagtctggaagtagtgaagtgaaaatcctctggttgcaattgtagcaaacaaacgaaatagatccccgaggcaacaggcaaaatggcatgaatttgcacatatgaaacatgctatatttttgaacccatgaaataccaaagcaacttttattatattaagtagggctttagttcaactataggtttagggcaaccgaaaatactagggactgtctctcaaattttagttgtcttacaccaaaatgcattgaccacaactggattgaaattaagtcacagctgggcgcagtggctcacgcctgtaatcccagcactttgggaggccaaggcgggtggatcacctgaggtcgggagttcaagaccagcctgaccaacatggagaaaccctgtctctactaaaaatacaaaattagccaggcatggtggtgcatgcctgtaatcccagctactcaggaggctgaggcaggaaaatcgcttgaacccaggaggcagaggttgcggtgagccgagatcgcgccattgcaccccagcctgggcgacaagagtgaaactctgtctcaaaaaaaaaaaaaaaagaaagaaagaaagaaatgaagtcgctttacatttttttcttgcccagctctccctatgatgtccctcctcttgtcggcttcagccatttctagagtcaaagctttctccagaccagcctgggcaacatgaggagactctatctctacaaaaagtttaaaaattagctgagcctggtggtgcgtgcccatagttccagctacttgggaggctggggtaggaggatttcttgagcccaggtgtttgaggctgtgattgcaccacagcacgccagcctaggcagtacagtgagaccccgtctcaaaacaaaccaacaaacaaaacccataactttctccaaactaaaatacactcagaataataaggcaagctttcttttgtactccagtcagaacctcttcacataagtaaagcccaaaagatatatgggaatatttgtagacaatgtcttaaactcaccatttgtttactgtgcctaaactctaaatggaagtcactacatgctcccctgacatgtctcaccaaggggagggaggacagcaaggaggaggggatctccctaaactgaaatataccaacttttctctgacacaatttgttcttaaagtgactaaaagtgcacaaaaacctttcagctagtcaaaataaaataagtaggcagaaataccaaattaggtaattttgaaatatatgggttctttcaatatacctctataattcacatagactgtttgcttgtcaaaacattatctataccagaatcaaatttagtcagatttaaaaaccaggcaggcaacttattatctgtaagagctattgagaagaataaatacaaaaggactgaaataaaaaatcaacagcggcaagcagctttggaaaaagaggctgagacaggtttctaaaatattactgatgttgagggaggtctattttcatgtgataactatttttgttcaatatcaccaactttcaatttatagcaaaactgatacattcaatttcagctgtctacttcacaaatacaaatctatttcaaatatcatggtcacatttatgtaaacatctgggagagttcagcaaaatgtctctgccatttggaagtcctaacacttcaatgaacataattatttcatacccatctcattctgctgtattttttgacaatgtgaaaaccaatggcataaaaatgaactccagtaagacaaatgattaaatcaaaccttgttatttaaatctatgtttgcccaaccactttcccttaaagccaattctcaaattcaagaaaatatggcaatatgttttagagcatgaaaaaagtttgagcatgctaacgaaccaacttgtaaaatataattacaaaagattacaaaaatgctatcttgaacatcttactggtataaattgcataaactctctcatgcaacatatgtcattcagagtaaagaggaaggaacaggattttaaacatcacatccatttaggaaattggatatcaactactcccatctcctgtcatgatgatgctttagttaatatcttttattctattttccagagctatcagaatgaaccatgaagaataaaagtacacaatgaaaaactaattattttaacagaggttaagctaggaaaggccttgtgtagcaagcatcctatgttatttcattcaaactatctgctaacaacagcaggaaaaaggtttgtattcttaccaatgaatttctgaggcattgagctttttcgttttgccacattgcttgctaatctgtccagtacgagagctctttcacttcccatctctgctttgatgtgtcttgcctccgcacttgctagtttggaaaaatgtaaaaagaagagagaaaagaacacattggtacatggggagaaaaggaaataaactggaaggagaagtgtccgaagttggatgcacactctattgttgttacctgttataactgctcagattcttgcctggggtacctgctgtggtcagtgaagccgacaccagggcacattcaaatcttgcagtcttatgccgagatgggaaagctcgacccatccccaaccagtaccttcattagcaagaggaagtattaaataaacagcctggacgtggttggttgcaaaaagatagatagatggagatctaacccccgatcagccttctttctgattctgagtaactgcgtgtgacacctgcagactgatataattcttaacaactttgaaaaaaaagcatggtgccccagatttactgctctgtttatgttaacagcacttttgaaaataggtacactcacacagatagcaagacatctactcagtgatttgtgtattgaaattctgagtggtttctttctttttctttttctttttttttttcagcacgctcctctcagttcctatctttcatattctgtttctctgtgctctgtattatctgtttcatatgctcttcacatttcaaaatagtctcaattaaaatttccctaagcaacacttctgccttgaaattaaagaacaatttgtataatgcatctgtattgaatttctaataaaaatgtgaataaaaactgcctatgggctgggtgcggtggctcatgcctgtaatcccagcactttgggaggtggaggtgggcagatcacctgaggtcggagttcgagaccagcctgaccaacttggagaaaccctgtctctactaaaaatacaaaattagcctggtgtgatggtgcatgcctgtaatcccagctactcgggaggctgaggcaggagaatcacttgaacctgggaggcagaggttgcagtgagccgagatggcgccattgcactcctgcctgggcaacaagggcaaaattccgtctcaaaaaacaaagaaacaaacaaaacacaaaaaaacctgcctatgaatgtgggcccatccacaaatagacctgtgagtggtgtaggcctgtggttctcagacctggctgcacattagactcacctgaatagcaggtaagaaatacctatgcccaggccccccttcagatcaattaaatcaggatttctggtataggggcctaggcaagaatattttcaaagctccccagatgattttaaaatgcagccagaattgagaactactagaagagtatataaatagtggcaatatctaatcaactaaaatagtaaactgtaatgaatataatttacctcaattcagcaggcagtgcccaaatttatgtctaaagttcaaagaaggccaggcacggtggctcacgtctataatcccagcactttgcaaggccgaggcgggcagatcacctgaggtcgggagttcaagaccagcctgaccaacatggagaaaccccatctctactaaaaatataaataattagctgggtgtggtggcgaatgcctgtaatcttagctctcgggaggctgaggccggagaatcgcttgaacccaggaggcagaggttgtggtgagccgagattgagccattgcactccagcctgggcaataagagcaaaactccatctccaaaaaataaataaattaattaaataaatttcaaagagataccagcttctctaaatacaaggcttgacattttaacacatgatgctagcctgaaccagggatcagcaaacttttgtctgtaaagggccagacagtaaattttaaaaatttgccagacacatatagtctctatgttatattctttgttttttgttttttttttttctgttccacggccttttaaaaacgtaaaaatccctgtacacaaacaggccactggctgcacttgcctagagcgccacagtttgccctcacctgccctgggcaaacatattgtgatgctgtaaacatttttctctgttttctcataaacacttcgggagatccaaactaaaatgaactatccatacatttctattatgtctaaggaagaataaattgaaattagtttaagggattagagtaaaaagcaagtagtggctggcacagtggctcacccctgtaatcccagtgctttgggagactgaggcaggaagattgcttgaggccaggagttgagaccaacctgggcaatatagcaagatcctgttcctacaaaaagtaattttaaaaaattagctgggcatgttggcatgcgcctgtagtcctagctacttgggagactgaggtgggagggttccttgagcccaggggtttgaggttacggtgaactattaaggtaactgcaaagaccacaattacttttgcaccaacctattagtgccagtgcactccagcctgcgtgacagagtgagactctgtctaaaaaaaaaaaaaaaagccccaaagtattaaatatttctaattttattagtggccttaaaaaactgtatgttagtcattacacaatacattataaagctcagttttcattatttagttaatttatttacttatttttgaaacagggtctcaactctgttacccagggtggagtgcagtggcatgatcacagctcactgcaggctcaacctcctgggctcaagtaatccttctacctcaggttccaaagttgctgggactacagtctaaagccaccatgcctggctaattaaaaaaaaaaattattagtctcaatatattgctcagtctggtctccaactcttggcctcaggcagtcctcccacttcagcctcccaaagtgttgggattacaggcatgagccactgcactcagccaaagctcagcttttttttttttcctggaataacataaaatctggctctgccaggtgtggtggcactagcccatagtcccagctactcaggaggctgaggtgagaggatggcttgagcctaggagttcaagttcagcttgggcaacacagtgagatcccatctcttaaaaagaaaaagaaatccagctccaaaaatgaaaaagaagaggatgataataatgtgataataatgacaatatttactagacagtgagtttcttgtcaaaaataattctaggctctaaaggaataaatcatagccttcagtgaagctattaacaactatttgtgtaaatgaaaacagtaagggtcagaatagggggcctgagtggcttttgggctagtgcaaaagtactcgactgactctggctgaccagcagttgtaaataacgggcacttcagccacaagacactgctattgagtgaagagggtcaaattctgtccagcacagggataggtttaaatgaccaaacaggaaattatttatatatattatttcctttcacacaaaaccaccaccagatgtggcactacccaaagccccaagagcagagagatgaaagacaaagcttggaatttgcagtaagttcctggggctgttaggagacttttttcttagaatcaggggagaggtagctaagtttgcactttgactaggaacattcatcctggttccagcaattttgagaagattaaatccaagtaagcctcccctcaaccctgtagttatcaacaaaaagatttatagggaaaaaaagaatgaaaaacagtattctgggaatgtttaccttttatgcccattttaccattgttcttattagtctattgtggtccctcctctcactgccaaatcattacccaggaattaccccaagcacggtgctacccatctagttttcccatttgtttctcagcagtcgctgtctacattttactgaagtcaatgtcaattaaaacaagcagctttctgaggacacgtaatcaacatcctctacatttgggaggatgctgaagtgtggacacattgacctaaataactgtaattagggcaggtcactaaatggcaaacttttgagataacatcaccttttattcctcgttacccaccaaactggtctttagagtcatttccagataaacattattctgtaaatcagtgaccaaatgcctgacatttaaaaacataaaattctgcagtgttcatggatggacatattttgaggcatgggtggagactttcccatttccacaactccgattagattgaaagaaatcctctgaaacgaatctagaggactcctgttcacccacaccctctttctgggtcattcactcaaaatattaactacaagagctccactctcattgtacatgtgaacacactcctactgattcagttgatcttcactgaattaaccttgttttctagttgataagttaggcaaaggctagttttcaattgaagatggcactcattttctttcctaaactgctagtcttttgcctcacacttgttggatagctgatgcacaataccatgaaatgagtgccctttgaaacacaaagagccaggttccatggtttgcgcctgtaatccagcactttgggaggctgaggtgggaggattgcttgagcccagggagctatgatcttgccactgtactccagtgtgaggaacacagtgagccctgtctctaaacaacaacaacaacaacaacacacacacacacacacatatcacacatacacaaagaaatgctttgtaactggacaagctctttgggattactgagtggtttaggcagtgcactgaaaagaaaaaaaagaggactattggcttttggtccttttctccaactttaggacccaactgtctatttatacgaacagtctagacttgttatcttgccacttcatatctcagaaatgtaagtggagggaaaccagtttggcaagatagtaagggaacaagataatgggtttaaatgacgaaataggaaatccgttcctgggtggtgtttggcggtgtaatgctgcaagtggtgggtgtggggaatatgggatggtggcaaggaacaatttgcacattcagctcatgagtgagaacagaatgagtagaactgtcattgtggatcaatttcccttcacattgcttgcctactaaatagtagacatactaattttcattagaaaagttattttaaagacgtgctgaaaaaataataaaatgtagtacaaagtcacatttacagattaggttactactacctttattccctgtataagtcttaatatttggttttagttaactatttccatgatacaatttctacctcaaagtcattggaggtttaactatgtaattgtgttgtgcttttgtttttgttcaaaatccttcattagatcttgaagtgttaagtggagcttaaataagaggtattgcttcctgtctcttctatggtgtagtcagtcagtaactaatggagagtggaacaaagtggtgttattatgcaatagaaattgtctaacaagagattggtatcaaagacagaggcaggttctaacaaaaaagtttcataaaactgttgcctttttgaacaagtaaaatgaatactacctgtgagatagcattttttattttttgagatggagtctcgctctgttgcctaggctggagtgcagtggcatgatcttggctcaccacaacctctgcctcccgggttcaagcaattctcctgcctcagcctcctgagtagctgggactatcagtgcatgctatcgtgcctggctaatttttgtatttttagtagagatggggtttcactatgttggccaggctgttctggaactcctgacctcgcgatccgcccacctcagcatcctaaagtgctgggattacaggcgtgagccaccgcgcccggccagtattgatttttaaaaagaataggttggggccaagtgtggtggcttacgcccataatcacaataatttgggaggccaaggtgggcagattacctgagatcaggagtttgagatgcctggccaacatggtgaaaccccgtctctactaaaaacacaaaaattagctgggcatggtggcaggcacctgtaatcccagctactcagtaggctgaggcaggagaattgcttgaacccagaaggcggaggttgcggtgagctgagatcgtgccactgcactccagcctgggtgacagagtgagactctgtctcaaaacaaaaaacaaaaaacaaaacaaaaaaaaataggttgggaaaacaaacttaaaaatttttaaacattttctttggtctgctaagttggtaaaaatgtaagtttattctgaagccctcatgcttgtattagcttgaagaactattgaagatgaaaagtttggagtcttagattcataaatagatgtgattattcaattatttaaaaatattattattgctagaactcattgttacataaaatatttcctgctccaagtattcataatctgtgtgaatgaggctaaatgaatctctataccggctgttagtctctttctgaaataagaatcaagctaatgggaaaatgcagtccatgttcttctgtatttttccttcttttcatatatactccattaagacagaattggaatattctgatggtgtcacttgtgatgcctgatgtagaaacttggactaaagtagcaatatcactagtgtctttttttttttttgagatggagtcttgctctgttgccaggctagagtacagcggcatgatctcagctcactgcaacctccacctcctggattcaagcaattctcctgcctcagcctcctgagtagctgggactacaggtgagcaccaccacacctagctaatttttgtatttttagtagagacggggtttcaacatgttggccaagatggtctccatctcttgaccttgtgatccgcccgcctcggcctcccaaagtgtcaggattacaggcgcgacccaccgcgcccggccaggattgtaaatccttaaagtgtaggggcttaaccttaactcatctttacaaacagctttgatacagagcctggcacatagagaactcaacaaatgctatctggataaaagaaatgattagcaaggccagaagtcctgttgcccaatacctgcatttttttgcaggctggtcttcactccaaggcctttttatccatctgcttgcttctagaaagtcctgcttccccttgcaggcaggtttgtccacaggcttggctctcacactacgctgcacttcaacttacaataagcacttgaagaatgagtgctgcaggcacaacagcaatggagcatcatctctttacaagtgacggatgaggcataagatgtactatactgctcaggctcagaatagaaccccatgtccacaatggactcccaattctaagaaggaaacagaaatggaaaccacacatggaagggtgcaaaatagttaaaggattggcttatgttgggttaaatattctgtaaattttggcctcaggaaaaattataggaactatttgaaatataaaagagtaatgtgtgaactgagatgcagtaacttgattaagctgtgaatttacacatttataacctgaaaccaccattacaacatatttgtttgaaaaaaaaatcaaaacttgctgacttagttaaccctttatctttttttgctgagacttaaagtatggtgcacgcatccaccaaaccaccctatgaaatgcaaattaactcaacctctgtatttcagcatttcctgaatcacctaatatcactgagaatagctaaaatattacttttgatacttttccttatttgaaattcctaaaaaaggttgtgagaatgggaagtaaggtggtgaccttacttcaaaatcaataattttgaacttactgtttatagagtgtagttttctgatttttccccctccttccaggagaatcaggacacacatatatgtatatacatgtgtgtctattagtatgtgtgttactatatttcttttgcaaaccagataatatataacctttaagaaatatagctaatcaagccaaaaagtggaaaaggtgtaaaagactcaaatgtccattagctgatgaatggataaatggaaagtgccatatccaaacaatggaatattattcagccacaaaaaggaatgaagtcctgataaatgcttcagcatacataaatgcctcagaaacattatgctaagtaaaaggagccgacacaaaaggccacatattgtatgattccatttatgtgaaatgtccagaacaggcaaatccatagagacagaaagtagattggtggctgccaggagctagaggaagggggaatagggagtgactgctaatgagcacagcactgcttttgcggatggtgataatgttctgaaataagatagtggtgatggttgtacaactttgtgaatatactaaaattattgaaatgtgcactttaaaaaggtaaattttatagcatgtgagttatatctcaagtttttgaaaattaaaaaatatgactaatcacaaaaacaactaaagttctggtgaattttaagtaggtcactgaattttgggcgagtctcagtcttgtcacctctaaaatgaagaagtagggtcagatgctctctttcattctagctttaaatattagtgattctacttggaatatgatagatttcatagcttgggaatctcttacagtgagagctttgcctattgtctgaaatacagaactgcaagtagagatgcctacattccgtccttgagcgagtactgcctgactgccatgaagcatgccacttaagatgtcaaaatctttcctagcaagcagactcagataaaagcaaaacaaagagaagatgtcaaaacccaaatattaggtttttctttttattttattattattgttttagagatggtgtcttgctttgttgcccaggttgggcttgagctcctgggctcaagcaatcctcttgcctcagcctcctcagcagctaggactacaggtgtgtaccactgtgtatgacctgtttgttttttataagggggtaaacatttctttttatttggataagctttatccaaataagttggatttcctttatcaaattagaaatccaactccttgataaaaccaaagatgccattaggataaaaagcagaagcactgcaagccatcagaattcagttggccagctcctaacatcatgcaataggttttatctaaaataaaagtttcctctcactcaaaatgagggcagtttaggtagtcatttctactccatttttcctgagtttcacattatttctgtcatctttttgtaacttttctgttttagcctattcaaactactcaactgcaacaattgctgtcaaacactaaatcccatgagggtttgtacctattctaaataagcaattggttcaagttaccaaataaaaatgtcagacaacccaagctgcagaaccaggctgacagccaactcaatgggacaaaggacagctgaagagatgtgacacaaaaaagtttcaggctgttccaacaaagaattaaaaggaaataaaaccacaattgagatatagaagaacatctagtgtttcaaccaattgccagtaggcatctaattcaaatcactgaataaaacaaggaatccccaaagccaaatagaagcatcacaataaatcatatgagtagacaaggatataaattgggccctgtgcaaagaaaatccttgtagttttaattgcctcttccctagccactccccaacctcctctaccctcaatttttgccattttttgtaaacgacaactccactcttcatcaatctgttaggaaatcttgttgactctacctttaaatatacagagaattagaatacttctcaccacctctaccactaacaagacataattttctcttgcttgaattattgcaatggcctcctaactggacccccaatttccaaccttgccccaaatacaatctcttctcaaaagcaagtagagtgattctttcaaatgagaagaccaatgatgtcacctctttgtacaaaaccctctaaagatttttaatttcactcagagtaaaagccaaagcctttacaatggcctgcaaggcctgagaagatctggtttcccatttcctctctggcttcaggtcccattactcactgtgttccagacacacagaactacgtacacttcttcaaatttgtgccccagggcctttgctcttgctgttccctagttatctgcagggcttactcaccctgttaagaagtctgttaaaatgttacctcgttgaagccttccctgattctcaccctcactcctcagcaactgcttcatttttctcaatagcacttaccacccgctaaccttccaacttacagtttgctcatttactttctttataatctgtctgcccccagtaaaatataaactccacgagtctttttacttactattgtatctcaccacctaggacagcagatgctcactaaacgtgtgttgcgtgaactcaccagtgtcccctgggtcagtgctctgaagaaatgtacggcagcgctccttgtgctcctcaagggaacttctctgcttgtaactccttccacaaaactcacatttgtagggtttctccactagaaggagaacataaggggcactcagtgaccctcaggggttccacacaggtcaggtattggggctctgtgacaactgttcactagaaatgagactgctgagtgaagccagagtatttggatacttttgaatctatattttaaatttggtaagcttaaataaggttatggtctatgattaattattacgtcagagtattcttcaaaaggatcgcctcctatcacaaatggaagaatttggatttagtgattaccatttcgcatactgttttggctccaggtcaaattttgttttctttgggaaaaagaaaatagggcccttttattcttcaaggaggttaatgtggtataagcaatgaaataggaaaggattctttattttggacatccatctggctgtaagtaaagattgctgtagtttgtgggagttagccattcggctagaaactgatggccttttcagaacattgacatatttgggtaaatttagctcatccttgccacgtggctatagcaaagtctaggctaaaacaataaaaactgagctaattaactacggatttttttgtttttttgtttttgagacagggtctcactctatcacccaggcttgggtgcagtggtgaaatcacagctcgctacagccccaatttcataggctcaggtgaagtctgggcctcccaaaggccaccttggcctcccaaagtgagaggcttacaggtgtgagccattgcacccggccaggatatttttgaataatagaaataaaaataggccgggcgcagtggctgacacctgtaatcccagcactttgggaggccgaagtgggaggatcacctgaggtcaggagttcgagaccagcctgcctaacatggcaaaaccccatctctactaaaaatacaaaaattagccaggcacagtggctcacgcctgtaatctcagcactttcggaggccgaggcaggcggatcacgaggtgaggagttcgagaccagcctggccaatgtggtgaaaccccatctctactaaaaatacaaaaattagccaggcgtgatggcgtgaccctttagtcccagctactcaggaggctgaggcagaagaatcgcttgaacctgggaggtggaggttgcagtgggctgagattgcaccactgcatcccagcctgggcggcagagtgagactccatctcaaacaaacaaacaaaattagccgggcgtcgtggtaggcatctataatcccagctactagggaggctgaggcaggagaatcgcttgaacctgggaggtagaggttgcagtgagctgagatggcgccgctgtactccagcctgggtgacagagtgagacaccatctcaaacaaacaaacaaacaaacaaaattagctgggcgttgtggtaggcatctataatcccagctactagggaggctgaggcaggagaatcgcttgaacctgggaggcggaggttgcagtgagccaagatcacgccactgcaacagcctaggcaacagagcaagactccgtctcaaaaaaaaaaaaaaaaagagagaaataaaaatgaattgtaaaaatgacttcgtctaaatgtctaagatgaaggaaaggtttcacccatacaattcatgcaaactttattctgccaactccccaaatgctttattgcttgaaatatgtaagtaataacttcaactatctgtgcaaggctggtctttctgattgttgatagaatatactcaatgaatttgtcagttttaggggctaaaatttttattttctaactcttgctctgtttaaaacagaggctttgggatttaaagcactaaaagatccttatggaatcctaaattaaaacaaatgcaggtttgctagggctaaaaatgttacgtttctgcataaattgggttctctggaatctgtctttaaaaagcctactattgtttcttacttgaaaaaggcaacagtagagaactattctaatttttttcgaaccaaactcatccttaattcactactttgaaaaatgagctgtaaaagagagaaacccttcaattgccaattatgatctctcatggtgggttttgttggggctgacttgtttaatcctagtggctgaattataacaagttttgagtttggggctaggttttaatcaaagcagtagatgtgaactgacataaaaacaagcctttttttccaattaaaattttgccagataacatcaagaacatgaggtcccaaatttgaaaataaactcagtcttatttttctaggacggaaattctaaatcttgaaaaaaaagtattatcttggtcaaaataaggagtaaaaacatcacgacagcacataacttttacaaatctttaccgttgttcaatcttttagagatttaaaataagtaggctggctgggcatggtggctcctgcctgtaatcccagcactttgggaggtcaaagtgggaggaatgcctgagctcagaagtttgagaccagcctgagcaacatagtgagacctcatgtttatttaaaaaaaaaaaaaaaagtgggccaatcaagaggaaagttggatttaataaatttatcccaaatggccaaaaagtagcccccaaacaatgatttatatccagatcacagtttttcataatttacaaactgtacatcatttgcttgtctcgtcttttgaatggaaagagtgtgtgtgttgggaaaataatcttctaataaagtttaccagaagaaaatactgatggctataattttctcacaaaaattaaaaggacattttttatagggtgggctcttcctatctgactgtgttgttctccatgggtgcaaggatggtgaggagatgatcatctccactgaggcagacggagagcaattagtgccttaatggtcgtgtaattagccctagaggtctctgctgttgtaacccttcagaacaagaatgacagattgaaaccttcctacttaactctttctagtttccacactgggctctgaggaatgcacttcctagacaaggaatgctcatttctctcacttaccagaatgtgtcctaagatgccccgtgagcgcatctcttctttggcatgcatagttgcagaggtgacacttaaaaggtttttcccctgtgtgcagtttaatgtggcggaggaggttacctttctgagtaaaagatgccccacactgattacactggaatgggcgttcacctttaaaaaggacaaaaaaggagatttctggtcacaggcaagtggagaaacatatgcacagattagatgcctaggggaaaagctcatcttttagacaattactgttcacattgggatcagttgggagctgcatttcaaggcaagcctaagacttacttatgaaatctcctctgtagaagagaaaaagcacccactagcaaggctattttaggtatcatattgaatcagagcaaagaaacaagagcagctctagaagtgctttctagatctaagtttttatattactatattacttggtactcccttttttttttttttttttttttagacagggtcttcttgctctgttgctcaggctggagtgcaatggtcccatcatggctcactgaaaccttgacctcctgggttcaagtgagcctgtcacctcagccttcagaatagctgggactaccagtgtttgccattatgcctggctaattttttagtattccttttgaatataatctcctttgaaaaaagagccagaaactaaagtccttacaaggtgttgagggctagaaattctcctttttaaagtcttcatatgagatatgggatggaatcgactggctcaagtgcgatggttgtgtttgtatgcatttctatagactacctgtttattgtctgaagatacattattttaagctggaaataaaaactatgtcctttcatttaccaaatttgaacccaatacaataagaagatctgctcttattaaaaatgttatgcaaaaatatacaaaagatggctaagaagcaaatcacacaattcaactcctacttagaaactgaagaaaaagtatttggctgacctagaacactgtgctctctacagtctttttttattcatagcatttgcaatatgtttgccaaatgcatggtgaggcaggaataaaaagcactgagtgaacagcaatgcagagagagagatacatcagcattatagcaaaaatcaatgaaagtaaccaaaagttccaaattccaccacttcatttctcacgtggctgcattaggagagttttcagaagaatgaaaaaagcagactatttaccagtatggcttcgcttatgaaccattaagacattgaagctgatgcaggataatccacacacatcgcagttcatctttccactggttggcctgctactatcgaatgagacaacatgtctctccaacttaatgttttcatattcattatattctcttgaatagctgtaagggatttcaggctcttctgcatttcccatgggttctgactttaaaacattctcatctctttcactgtattcatctttcactttcattgaatcatctgcagggaagaaaatgcaagaaatgaacaacgactatacttgaagctatcaaagcagctcaaacagcagagacccacaactgacaattaaataccaatcgaagctaacaaaacactgtacatctacaaaacaagaaagcaccattagcgtgaccgcacgttatttaaattcagaaccacagtcagaggaaaacacacatacttacacacataaaaatagacgatagtgttttaggctatccagaaaattacagataatagattttagctaagtttgctcaaagtggccatgaaacaaacattgagcaactcttctccagtactaggggagaggaagggttctcagatctagtactgtttttggtggctgcagttaaaaaggcaaggtgatgtactcttaggtttcaaggagaaaatattgtttgaatccttcagatgcatccagtgtaagccattaagattaagagttgactagttaacatagtttttctaattttaagccatgcattgcctcttccccttccacgtatatgaattgctaaaacacatcttatctctgtctctcttggagctgataaaggcacaacattgactgtagaggaagttgtcagtactaatgaaaaagtgttgagaaagacaaaaggaaaagtaattctttcatataacctaaggagtcactttcatcgacacaggtaagtggggctcaatctaaataaggggaaggaccattaggtcccaagttagggagaactaaactcaaggactcaaggattgtgtaataggactggataggagaggagggactggctcaagtgagttggctgaccaagtactatcttaagaactgcaatgtaaatgaatgaaatttaaaagaagagctgtaatactcttcatgaagagcataagaacatatgaagaacgtgggaaaaatatgaagaacataagaaacaaagaaggcaaatttatgtacttgcactgacactagtaaaacctaaaaatttgcctgatgtaagaataataaacatttgtaagggattttgcatatataaaatatgctatataaatgcttactttttcaaccattggtccttagaaatcaaaagttgtacctccccatgaggaatcacaaatcaatggagtgtagggctggaagggaatttaaaggtcatctaatccaaccctcttgtttctcagatgaggaaatctgggagcagagatgtttttggtcatttgtcgaaggttacacatccagttactggcagaggtgtgattagaatgcaaaacttaagcttgaactatcaattacttggatttgacctcatgcactagacatataaggcctaagtgggttcttaccaactgtattacacaccctcccatcaatggtgtaaatgttaaaacccaaaacagtctgaaaaaagatattttaaaaaactacatcccttccaaaaaacatcagtaagtgttgctcctcttgctgcataggaggaagtacaactgcagctgtgcctggcttgctaccttcaacccaagtttcaattttcacttctatcaaggttacctttcatctatattaactgtgtttgcttaatagagcaagacagggcctaaccaccatcagaggagccagggctgccacacagttccactgcttcctaccacagttcatggttcacaacttttcactctttgactagcaaagatgtagggctgtaggataagtccaacatgtttcaaatttgcccaccctatggatctggattatataagaaatgatatctgtttcctacttggaaagaggtttacttctttctctggataggtcttccctgctttcaagtggaatttgtttgcttaagtgtttattttttatttttttaagagaaggatgcacctgaggcttgtacttgcctcccttcctccatcactccagctgtgggtaatatcccaccaaagcttgagtgctcttcagtttgcatgtaggcgtttaaaagaacctcaacggaaaatttcagctacttaaaaccaaaaacagcagatagaaaaggccagcagaaaaggatcctttccattttggttagaaaatgtgaacatgaccagactcaggccactccatggtcactgaactttaaaatgtagtaagatcaatgtgttgagtctttctgaaaacagaggacataagagagctgctcctttccctcaggattttggctttagttggcctgacctggaattcaatacgacaccatcctggctcaagagcagatcttagctttagtcctttaggagtcagctatagagcaaggaagacagtatttgagacccagggacataaggacacagggacagggcattagagaagtcctttgggcttacatagttgctggtttgcctttggagtcttaccagttttagatgaatgacctggatgacctctctgcatggttactggggattagcaacttatttttattttattctattttattttttgagacatagtcttgctctgttgcccagcctggagtgtagtggcacgatcagctcactgccacctctgcttcccaggttcaagtgattctcctgcctcagcctcccgagtagctgggattacaggcatgcaccacaatgcctggctgatttttgtgtttttagtaaagacggggtttcgccatgttggccaggctggtctcgaactcctgacctcaagtgatccaccctccttggcctcccaaagtgctgggattacaggcctgagccaccgtgtccaaccagattctaatttattctaatattcaactctgttaccttctcaaggtaagccataataaattgctggctgggcatagtggctcatgcctgtaatctcagcactttgggaggccaaggcaggtggatcacttgaggtcaggagtttgagaccagcctggtcaacatagcaaaaccccgtctccactaaaaatatagaaaattagctgggcatggtggctcccagctactggggaggctgaggcaggataatcgcttcaacctgggaggtggaggttgcagtgacccgagatcgtaccactgcactccagcctgggcgacagagcgagacgccatctcaaaaaagataaaataaaataaaataaattagaatttaaggtatgaatgagattcctgagagatattaggcttagtactcagcctccaaacacagtccaccaaaaccaggaaaggcattagcctgctctaatgaagagattcatcccattccctggaagacttattgaagcagagaaaaggggtgttctacttagaaaaattctattagaaaatactaatgaacatgtctaaaatcaaacttgtcatctttgaacccaaacttgcttctaatttatgacttatttatgttgacaaatggcatcacccttcttccagtctccaagccatcaaactgtggaaccttttctctttcaatttctacatcaagtcagtctccaagatctatcaactctatgtcttcaggctctctaggtgccaactcctcttttcctttccttttgcaatttggtttcacctttcatcacatcatacctaaattcatcctctctcaacattcctttcttttttttttttttttgagtcagagtctcactctgttgcccaggctggagagcagtggtgtgatctcggctcactgcaacctctgcctccctggttcaagcgattctcctgcctcagcctcctgagtagctgggattacaggtgcccaccaccacacctggctatttttttaattttttttttttagtagagacggggtttcaccatcttggccaggctggtcttgaactcctgacctcgtgatccacccacctcggcctcccaaactgctgggattacaggagtgagccactgcgctcggcctcaacattcctttctagacagatttaagacacaggtggtccaggagcggtggctcacacctgtaattccagcactttgggaggccgaggcgggtggatcatgaggtcaggagatcgagaccatcctgactaacatggtgaaaccccatctctactaaaaatacaaaaaaattagccaggcgtggtggtgtgcgcctatagtcccagctactcaagaggctgaggcaggagaatcgcttgaacctgggaagtggaggttgcagtgagctgagatcccaccactgcactccagcttgggtgacaaagtgagactccgtctcaagaaaaaaaaaaaaagacataggtaagctatgcttactgcctctacagcctcaaaaaggactcagaattctctgtaatatggcttccgcctccacaattcacttaatctgctcccttgaatatcaccaaccataatctcctgattcctagattcagagcctttttgtatgccactctctccaacttctttgtaatcctcaacactactgaccactcaccattccttgttcttctgcactcctatgtcttttctttctttctttttttttttttttgagacagagtctcactctgttgcccaggctagagtacagtggtgcgatctcggctcactgcaacctctgcttcccaggtccaagcgattctcctgcctcagcctcccgagtagctgggactataggcacgtgccaccacacctggctaatttctgtatttttagtagagacagggttttaccatgttggccaggctggtctcgaactcctgacttcaggtgatccacctgtcttggcctcccaaagtgttgggattacaggcatgagccaccgtgcccggcccctgcactcctatttcttcaatgaaaatgtaccttctttccttgcctttctgattgcttccttcttgccccttttcttccctctgcatcctaaatactgtccttaaccttcttttttcttccctctacacccctcttgtatggcaatttcattcattcttaaggcttcgactaacatcttatatgattaatttccatatatataactccaggtgtaacctctctccctttctttagtcctctatttctgaaggcttcctaggtatcttcccagttactcaggctagaatccttagagtcatctttcctttctcctgattgggccccacattcaatcattcagtggttctatctgtgtatccaatctctaatctgtttctccactcctgtattttgcatgcccattacctaattctcagaccctatgactttcccacgatctacttattgctgtagcccccgcactgttctctttggctcccttctttctcctttccagcccgtcttgtttgttgctacaagattgctcttcctaaattctacctctggtcatgtcatagccctgtcaaaattcttcaatattttccactgccaacaaaataaagtccaaactcagaaacaaataatttaaaaggcctttcgggatctggccccaacctatctttggcatattaattttgactagttagatctttaactaaagagcttctaagtagtcttatttctactgcctaaaagatctttccccaatatggccacaggtccaagtcctacacatcctacgtattttttttttttttttgagacggagtctttctctgtctctcaggctggagtgcagtggtgcgatctctgctcactgcaacttctgcctcccgggttcatgccattctcttggctcagcctcctgagtagctgggactacaggcgcccaccaccatacccagctaattttttgtatttttagtagagacagggtttcactgtgttagccaggatggtctcaatctcctgacctcgtgatccgccggcctcggcctcccaaagtgctgggattacaggcatgagccactgcgcctggccactgtcctacacatttttaaaggtcaaactaatatgctgtctcctggctactatgccttctctgatcaacccagctggaaaatagcctgctccttcttcctgggttacttatgaactcacctcccctagtctccccaataaatatgtaaactagctgagggcagaagctatacagattgtgtgtgtgtgtgcgtgtgtgtgtgtgtgtgtgtgtgtttaactcagtattccctatgacactgcttaacctgtatctgtaagaccagaggttatgtggttttaaaatagaaaatttggggctcctaccatagatctactaatctgggggtggagactggaaatgttcatttaaaaccatgctctccagataaaccttatgcacaatggagtttgagagccactgcctcgagttagatgcagtgccctacataaagtagacatcccataaattcctggtgtatgaatatatcattgcattagcctcctaactggcccacggtacatgtgacctctgttatactgcatcctattgccagaataatcatgctgtagcaaagaaactcttatttaaaactttcaatgatttcatttgcttatagaataaagtccaaactccttaatgaggtattcaagcacctgtccagaacttgccccaggactacttaatcatctcatttctcagtcttcttgaatcacctttctctctatactagaactttactatgcaaagtgaggtccttggataagcagttctgcaaccgcctgggagcttgttagaaatacaggtgctcaggcctcaacctagacctactggaccagaatttgcattttaacaagatcctcaaggattcttatgcacattaaagtctgagaagcacagcagcaacatgactaatcacagttcttcaagcctcttctccagcctttcccacacctaaaatatccttctaccatttcaatagtgtattcaaacttccacatgcagtttaaatgccacttcttccatgaagtcttccttgatacccttaactagaaaaaaaattatgtttctttgttctcatacatccgtcttattctgctttatatttagtatgatataattacattgctacagatccgcttttatgtagttgatgtgttcataaaatgtttcatgcaaaaccaataacactgtcccgctgattaacattctacattcagaaatgtttattttgccctgatttcagttgtcagtgactggcaacacccgttcatttaataaaggcagaaaatcttaaagacctggcaacaaatacttgaatatatttggggaactgcctgatagtatcctgaagtcttttgtaaagtgaataaaccttttatagtatgaataatctcatgttttggttttgtaaattctaatcttcttataatatatatcaggtttcttagacatacatcttaagttgacacttagaagactatcaagaagcctcatagacactggtgaaagtttatttcttaagtcaggtggtgggtgtatggatgttttcttattattctttaatctatacatgtaattatacttgcctttttgtacatatgatctattttataataaaaaaagttaaaggcttcctgaataccttttttataactgaacttgtggagaaaagaatataccaaaccacaaattgctgataaaggtaattgctatacattcccagaggcagggaaaagatgtctaaattgaatctaacccataggaaattagattaaactaaactttctaaaggagctactctagggtacaattgctcccatctttgtctatgttttcaggcctcttaggaagatgacacacacgaacacacacacacaccccagagagaattttgtaggctgaagagaacaaaggtttggctcactggggctgatgcacatggtttcatttcctggggtgatggttatcacatgaaaggcttgtactccagagcagacatttttggtttcacctgagacactgcaaaaacaatgggtcctggaaaggatccaacatctaaatccttcaggggcaatagcagtctcagccaactgtgcctcagtttgtttttacaggcacataaaatgctcagttggagagaagaacctatcaaagatggcaaacagaatagacaacttgggtatcttggagagcatgttgatactaggaatttcccagtggaaaaaagagattctgaatttccaccttaaactatgagatctcagaatccaactctacgaaggacaaagttggaagtaatatcctcaggtctgccggagatattgtgagaagggacaaaacaagatagaggctgttagggaaggcacaaaagggtgatgttatttaagtgttttacaaggatcgggggtcataaccatgaaatcttcagcaaatgcaaaagtcaactggataacaaagaagcttaatcatcttaatgtggcattttaatgatgccactgatttgctatgccaattcagagataatgaggccctaatgctacagatgttcagccaggctaaaagaaagggggtgggggggggcttttctagcacgccattttctaactatccaattaaacaaattgtgaaagcatctaaatagtttaccaggttttgacagctgttaataggatttagaagcttgaagcactaaagagcaaaatgggaaatatatgtattgtaggtattcagtctacaaagtttgttactgtcgcccaatctagcacaaacagatgaactagaacagttttccttataaaattaatgtctatacttctctcccacaatgacctctttgtattaggaagaagaacactgaaacgatgggtcattttcattttctaatttacatttttgcatgtaaagtaatgagagagagaaaccgatgatatttttagaactaaagagtaaggaaagttttaatatttgctaaccagtaaaattataaagcttcaatgcaaactaaacttttggtcattgatttataaaatctattatgttttctttttttctcttttaaaatttaaaataatggacgtctgttaattttgaaaatgcctatttttaaattaggaaaaaactggaaaaggtaaatcaggctaacaagagatgaaatactggcagggcgcagtggttcacgcctgtaatcccagcactttgggaggctgaggcaggcggatcacgagatcaggagatcaagaccatcaagacatggtgaaaccctgtctctactaaaaatataaaaaattagccgggcatggtgacgggcacctgtagtcccagctactcgggaggctgaggcaggagaatgctgtgaacccgggaggcggagcttgcagtgagccaagatcgcaccactgcactccagcctgggtgacagagtgagactccatctcaaaaaaaaaaaaaaaaaaaaaaaaagagagatgaaatactgatatctcaatacaggtttggataaaattctatagatttaagttctcattgaaatacatttttggccaggtgcaatagcttacatctgtaactccagcacttcaggaggcagaggtgggaggatcgcttgggcccagaagtttgagaccagcctaggcaacaaagtaagaccctgtctctacaaaaaatcaaaaaattagccggatgtggtagtgtgtgcctgttgtcccagctacataggaggctaaggcaggagattcccttgaactcaggaggtcaaggctgcagtgagctgtgttcatgccattgcactctagcctgggagacagagcgagaccctgtctcaaaaaaaaaaaaaagaaaaaaaattaaagtcatgagaaaatagccaggtatggtagaatacctgggaatagctgggaatacagcatgcctgtagtcccaactactcaagaggctgagaagggaggatcacctgagcctggagaggtccaggctgcagtgagctgtgatcatgccactgtactccagccagcctgggcaacagaatgagacctgtctcaaaaaaaaaaaaaaaaaagaatctaaactggccatcagtaaatcacatcacttcaaacacaagagcattagcatgtaaaaagtttcatttgcaaaggaactaccctcaattttactaataacattaatttttgccttatctgactatcaaatagctcattcatgggcataataataaaaataattttgcttaataatttcagtgcaattctttgcttccccattagaagaagaggagatttactacttttacaacagaaatacactatacatcagcagtaggtaaggttccagctgctcagctgggctaagctcttcaaatgtcatggggccaggtataattctttatctagaattgtgaggactgaaggccatgatgtatgaaaggtctttctaaactataaagagtctacaagtatattgtttcatttctgcccattataacaattactttttctattgattattttcatctatgtattaaactcttttgtatttatatttttgagaaataactgctacccatcaaaaaacaatggatgaaatacatttaaagaggctgaagttttagatgttgcctaaacaagcatagactaaagtagttacctggtagaaacttcatttgtaaatccgaaagaaaaaaaacttcctttttcattcaaaattcccttgcatagaatattcactctatcttttttttttttttttgagacagagtttcgctcttgttgcccaggctggagtgcaatggcgcgatctcggctcacagcaacctccacctcccgggttcaagccattctcctgcctcagcctccggagtagctgggattacaggcatgtaccaccatgccctgctaattttgcatttttagtagaggcagggtttctccatgttggtcaggctggtctcgaactctggacctcagatgatccgcccacctcggcctcccaaagtgctaggattacaggcgtgagccaccgcgcccagccactctatcttttttaaaaacaggaatgaaaaagtttaaagcatgttaaaatacaattcttagtaaaattcaaaaactgtcatccaaatacaattggctaaaaaacattctgactgtcacaataccaaactcagggtcacaggtaaaggaaggaatgaaaaagtcttctatatccagagcataagtagttcttggtgtatatagcatgttttgtgttatatcacaattagtgtatttatctcccatatagactaggagtattttcaaggtggggaccaggtttaaataatatttgtgtccccagaacctaacaagggcctcgttactttagaaattgaatgaatgggccgggtgtggtggctcatgcctgtaatcccaacactccagcactttgggaggccaaggcgggcagattatttgaggccagcagttcgagaccagcctggctgacatggtgaatccctgtctctactaaaaatacaaaacattagctgggcatagtggcacgcgcctgtaatcccagctactcaggaggctgaggcaagagaatcgcttgaacccaggaggcagaggttgcagtgagccaagatagctccactgcactccagcctgggtgagagcgagactctgtctcaaaaaaaaaaaaaaaagaaattgaatgaatgaatgaatgaacttcttgggcagcctgaaccaatttagtgatgataactaggccaggcagagaagaagtagtagatcacaatagacccctaacttgtctacaagattctgatgctgtcatgcagtatgtagtttctcttaatgcatcagaataaggtccatggcccacagtgatagccagtcatctagttgacttctttgcccattgtggtctggcttctgcccttcctgctccaccattttgcaataggatgccactggccagtccctgctttttaaatctctttccttggcttattctttgctggtcctactcctacctcacttatttacttatatcctctgtttattcctctttctctatctcctagatgtgaattatttcctagggcctatttcttgaaacttttgccttttcactttacatactctgtctcctgatccaagtttttattgctgttgactctcaaatttttatttccggtagacctggaaagccatagacatatacttcctgacatgtacaatcacttcctgaatttccaacacttatctcacactcaacaagttgcaaacaagctccttatctctcccatttcttctccgcttttcctataatattccccgttgtcctctctacatagtggctgtttgatgtcaacgtctgtatattatgctgcttctatcaacatttagcactgatacagagctcagtgactacttaccaaacaaacaaggaagtaaggaaggaaagaagataagaaggaggaaaggaaagcgtgaacaactatactattatttgcttcaagtacaaaattagggttgacagtgtttttaaaaattgtacagattgcaattttgcctaaagctagcatattagccgaagacagagggaaaaaataaattgttatttctaactcaaggtataacaatcagacccaaagcgtataaaggattcttggatgagaaggaaatgagtataaggattaagaattagaagactcttgttctttttagcattacattaaaatacaaaataaaaattaacatttaccatctgtaacatattatttagacttttacccatctctggttcttcccttccttcttccctggttctcaaataatggaattagagcactgagaaataatagaagaaactcagcactgacttctcctgggtgaatgtacaacattaaaagcacacaagggaatgagctatcttgtcactggaacatgttcatccctggggataaagtgtaacaactgcttaacagctgcccagtaacatacttcaaggctgcaagcaaagatgcatcctagctctactggaaactgcagagggaatattgtctggcagaataaaactagaatagaatctggccaacaaactgcaatctatgtcctttctatttcaaacagcagcttctaatgatcacagagaggtttctactaacaatattcaagtaatattggatgggtattggtaattacagggaaggaacaatatggtatttaacttatttttttccactgaaaatagagttgaatgacttctttttttttaagtttctgataaaagagcatgggctttggagtaagacagaacccaggttcaagttgtactaactagctgtgtgacctcagcaagtaatttgacttccgtgaattttctcatttgtgttgcagtaatgataatatctatacctaatagggctgttacagtaatgaaattaagcaaaataatgtatatataggcgtagcatagtagctggcacataatatgttcatgaccttgagacaggcaaagatttcttagatacagcactgaaaacatgattcataaatgaaaatatcctgcaactcagtaagacaaataatccaattttaaaatgcacgaaagtagtctttagcttttctaaggtaataaataaaatttttaaaacgcacaaaagatgtgaattaacatttcaccaggaaattatatgaatggacaacagaccaatgaaaagatgctcatcatcctcagtcattagagaagtgtgaattaaaaccataatgagattccacttcacacctgctagaatggctactataaaaaagacacaataaagagcgctggcaaggatgtgaagaaaatggaaccctcatccgttgctggtgggagtgtaaaatgatacagtcattttggaaaacagtttggcagtatggtgggcagccttctaaaacggctcctagcattcacacccttgtgtaatattcccctccagtgtgggctggacctaggtgattgcttctaatgaaaaaaacatggaaaagtgatggaaggtgtctcttctgtgtttaggttataaaagactgtgacttccatctctctctctctttctctctgtggtgtttcttgcaagcttctcagatgaagtaagctggagagcaaggagctgaaggcagtgtctggccaacctccagtgaagaaacgaggccttcagtctaacagccttcaggaactgaatcctgacaacaaccacatgagtgagcttggaaactgatccttccctagtcaagtctttagatgagaccacagttcaggtcagtatcttgttagcagccttgggagagactgaagcagaggacccagatatgctgtgcctgtattcctgagataatatgttttaagttgctagggtttggggtcatttgtcacacagcaatcaataactaatataggggtagtttcttataaaattaaacataaatttaccatacaagccaacaattctaggtatctgctcaaaagcagtgataacctatgtccacataaagacttgtacataaatgttcatagaagctaaaaaatgcaaacaattgaatgtccaccaaacagtgaattgataatcaaaatgtactatataaatacaatgatattctttttttttttttttttgacagagtctcactgtcacccaggctggagtgcagcggcatgatcatggctcactaggcagcctcgacctcctaggctcaagcaatcctcccacctcagtctcctgagtagctgggactatttaaatttttttttttttttttttttttttgtagagacggggcctctatatgtttccagctactcgggcggctgaggtgggaggatcacttgagcccaggagtttgagaccagcctaggcaacacagtgagatcccatctcaaaaattttaagaaaaaagaaataaaagaaacaaactactgatacatgcagcaacatagatgaacttcaaaaacattatgctaagtaaaagaagccagaaacaaaatattacatatggtattattccatttatatgaaatacccagaaacagtaaatctttagagacagaaataattagtggttgcctgaggctgcaggcaagaatggggatcaactacaaacaagtacaaagggttttttagggtgatggaaatgttctaaaacatggtggtagttgtacagctctgtaaatttactagaaaagtcattgaattgaacatttaaagtatgtaaattataaccacattaaagctgttttaaaaagaaatctatacagataaacaaaacaaaataaaattgatagctctgatactgactctgatactgactctgtctcaaaatgggaatgtttagctacccattcaccaatgattacaagaagcatcatggtaagtatagtttctgagctatgattacttccatatgacaaatgctcagaagactatttttaactccttttgttcctgtacaactgatttcattccctttcaacaaaattaacaagaattagcttgttgaaaaacacaagggcacccgctacttgacagtaggaaaggaaggttaaaaaatcaagtataaaagagttggcctgattggacatttcccatacttagttattttattatcgatttcagacaaatacctaactactgatttttgctctttctaaattgggctaaaattcataaggatccagatacataaggatatattacttctttgttatattttgtgcttttatggaccatactgtctcactttctgttctgttaataatttagtgtgttttactaggctgtggttattaattagttaatgagcactatctctggactgcaaagcagcagtgatataaatgcacctggggaagttcactgagggttcattcaggaatgtgagttctctcgtaagacaaaataagaaaataaagaattatcttttctttacagtctgagagagagagagaactagtacaacctgaaggactagaaccggaaaatcaagctgatggtaagtaaggaataggtcatataaaaatgcaagagagagttctgggctccaagtaatgaaaagagtaataatggaccattaagtagtgtttgttcaaatgtcggtggatgggaggtatgaccacagcctaggctgacttaacagaagttaacaaagagcctttcctattttctcaagggctgctatgaaattacttaaggagtaagaaaggataacaaaggccctggctgagatttttgcttctgtagacgcaggtgcagaaaaggctggttctaacacatcttgtcaatgtctttaatgccaccagactgatgaatatagtgaaatatctatcgtgatcccatttttacttattcagttgacataattagcaaatctattaagggtaaggtcacaaattatttttagttattaaaccataggtctccatatgttactgtttagacagtatcacccagtgcagaatgtagttttcaagactgtcattcctgcaacctcaaatctagatccaaatgcagtcagttaaagcagatttcaaccaggcagctaaacgagaaaacatctggacctaccagtcaaaatgagaaaggtcacatgttaaacccagataatcttgtttattggtgtttgaaggttatacaccaagggctggattaccagggtgctcctttaggcctggctctgacatcttcattcacctgctgtgtgtgtgacgctttaaaatccaaagctttgaaagtactgtgttattagtcacttccaaatgtaattttcctaattctaagcctgaatactatgtcaacctattgctagactgctgattagatcctggaagaaaccgcaagacacaactgtcaggggcagatgatgtctattcttttaaaaactgttttccacatttccattcagcatttttctatggatgaagcacctgtaattttctccatcaaaattaagaaaagaaaaggcctctgaataagcaaggaataaaattaaaagattgacatagatttcaggatgatgatgaagaaagggagattgaatctttcattatttttcataattagtattattttatatacaaacaactgaaccaaaattgtttatgttggaagcaattccacatgccagtgcatatgaaactattatgaaaacagcaaagtcaagtttcttaagactttacatgctttggtcagatctttttaatcttttttaggttgtgaacatctttgagaactgtactctttgcccagaaaaaggtacacatgcccataaacacgaaatttcacatactattgattgatttctcaaaccctgagatctcaggttgagaatctctgcctcaggcctttaaataggctcaggcttaaagacacctctgtgttatattttgtaaacttcatataatagtggttggcatttttcaaattttttgctcaagcatcctcaaaagaattttgaaaaattatatatctctcttatacatagtggacattaagtacatactaagttgacatctataatttttcatcatgagtttaactatttttaaacaaaagaatacagtttgtgtattgtaaataatgatagtttaaaccattaccacaccctttcaaatgtatctacttaggaatatatacatatttgtgatttaatttactccatcatgaatttaaaaatacataagtaagcttttcaagaaagtcaggaaatttctctttgaacttctatttccatttcactacccccatggaattttctcctaatgtagtactcttgtatgcttgagtcatctattgttcatcccattatatgtatctgcagcaaaaaaaaaaaaaaaaacccaataaaatatagttacttttgttaacatgaagtgctatgtgtcaaaatgtgttttcttctggattgaattagcattacaattattaacatacaattgagtaaaacaatataggtatattataatttgatcaataattaccaaatacaaaaagtaaaatttattgggactgtatctcctaatgagaaggatagagaggaaataagttatgaaaatttgataaaagaaattatctaattgatcctttgtttggcatcttggaagtacttacaccttagaggtgggtgagaaatgttcttttcttttataaagtggagaaggaaggctgggcatggtggcttatgcctgtaatctcagcaatttgggagaccaaggcgagaagatcacttgagtctaggagttcaagaccagcctgggcaacacagtgagacccctctacaaaaagttaaaaaattagcagggcatggtggtgggtgcctgtagacctagttactcaggaggttgaggtggaagtattgcttgagcccacgaggtcaaggctacagtgaactgtgattacaccactgcactccagcctggacagcagagcaagaccctgtctgaaagaaagaaagaaagagagggagagaaagaaaaagagggagaaagggaggaaataaaaaaagagaaagagaaagagagaaggaaagaaagaaagaaagaaagaaagggaaagaaagacagaaagggaaagaaagaaggaaggaaggaaggaagaaaggacggaaggaagaaaggaaggaagaaaaggaaggaaggaaaggaaggaaggaagaaagaaagaaaggaagaaagaaaagaaaaagcaagcaagctcaatggcagcagtcttctaggcagatcagttttaggaagaagggcagagaatatactgaagttgcggacctggaaattgattctcttaaaattatcccatgcaatccttggaaagttttcccagcatttcaagaacactactaaaataaaagaccccaatgccaaaatgtactcacatgctgttcttcactttagttaatgaaccaataattatttagtgagcacttgtgaacactgcaggggataaatggatgaatggatggttggatggaaaggcagaaagaaaaatggataaacactgagcatttactatattcccagaactttggcacaaaagaacacaactataaaagactgttcttgccatgtctttgggacacaatcaagtacaataacaccctgccacaatacaatgtgtacaaatttggatgtaaaaggattgctgattgcctccagttgtctacccttgcccacttctcagacaagagcaagctaaagttcttatgggaatggataggaagtaattgcttcaagatcatttgggtcttttaaggtttacaattgtgtccagtttaaacttcactgtcattgctttgtgctttttgtaacagtatattaaaaacaaaacaaaacacaaaaccacctactatatttcatttacttgcaataatatgacccccatattttacaagataaaatttcgggatcccatctactatgttgtggagagagctcatgtactcttcttgtctccgacactattctctttcatgcaaactacaacacaaaaacaaaaacaaaacagaacacccaaaacccaaaatccctttgggctgacaaattacaaaaaatttgatagttctgatgagccaggacaggattttgttcagtcttcagtccagtggtgttctggtaattgcttaacaaccagctcaggatcggggaagggcttatttgtggcatttgctgatttcagtggtataaatactccaccatggccaatttcaagctaccatcatggagtcagccagcatacaaaattgttgaaaatttaacaagcagctatgagctgattctggcacaccactgggactcctcatttatccctcagcagggtaccttcctctagctatcaaatggcaccaaggtacacaatggctcgggtcaccgtgcctggtgccaaagtttatttgagaagcagaactcacttggcaagaaaagctgctatgaaagttagcaggcacataagggtgtttcatgcgttctcttaatccagctggaaggaggcaccaacactactgcttaacagacaaagaatgcaaaaagaggcagggcgaagtggctcacgcctgtaatcccagaactttgggaggccgaggtgggcaaatcacgaggtcaggagatcaagaccatcttggctaacacggtgaaaccccgtgtctactaaaaatacaaaaataaaattagccgggtgtggtggcgggcgcctgtagtcccagctactttagaggctgaggtggaagaatggcgtgaacccgggaggtggagcttgcagggagcccagttcgcaccactgcactccagcctgggcgacagggcaagactccatctcaaaaaataaataaataaataaataaataaataaataaaaagaatgcaaaaagaagggagaaaactctccagaggatccactaaggacagtgggcagccccatttttctgttaaccattgcaactgtctgtggctctttggcagatgtcaaatatcttcctacacattccttttagtttgctgtgctacgcagcttagttatgaaaaaaaaaaaaaagaagaaaagaaaatccagagatgttttctgttaaaaagtttcaagggccaggcacagtggctcacacctgtaatcccagcactttgggaagccaaggcaggaggattgattgagtccaaaagtttgagactagcctgggcaacatagcgagaccccgtatctacagaaaaaaaaaaattagccatgcatggtggcatgcaactgtagtcacagctactctggagtctcgggtgggaggatcacttgagcctgggaggttggggctgcagtgagccgagatcgtgccactgcactccagcctgggtgacagcgtgattaaaaaaaaaaaaagattcagggagagatgtcttggttttatcatcaacagaacttacccgtttgacacagtacaagctgtaaagctctgcccatggtaagcacttacagaaatcccctgtgagtgaacttctgcagcacagcactgctgattttgtaagataacccctgcatcccatgagtgacaggtcttgatctgggcttgagagatgtaatattttgataaaaaacggcacttccttttgaagcatatatttgcgtgtactaagcagtaccgcgggagcctcagcgagtgcctaagcgaggctgacgcggtctctcccagctcgctccagccacccttcttcacacatctaaatgtggcggtaattagcatccataaaccacacatgtggcttaattttttttcccctttcagaagcatcaaagtagtttgtacttcttctaagcaccaaagagttgtacacctcaaaagggaccgagactatgccatgggaagctactgaagatgggagttatttctcctaaggggaagaagaattatttttttcagcaagctttctaattaaagttcttatctttgatctaagcatctacactgcacaagatgtcacaatggagaaaatataaggcctttcaaaagtgatcaaattcaacttttctcttggaatcaggcaagacccatagcttgtacagaatggaagtaattaaatacatacaccgattgatcaccactgcacaattaattaaaaaagaaatctatttcatgatgggtattgggtctatttgatatttagttacagagccaggagatgaagggtgtactgtgttgaatagtgtccctcctaaattcatgtcctcctggaacctcagaatgtgactttatttggaaatatcgtcatagtagatgtaattagttaagatgaggtcacactggattagggtaggccctaaatccaatgactagtctccctagaggaggacagaaacaggagatgcccacagagatgaagcccacgtgacaatggaggcagagattagagttatgctgccatgaccaaggaacaccaggcattgctggaagtcaccagaagccagaaagaggcaaaaaagaactcttccctaggcccttcccatggtcctgctgacatcttaattttgaacttctaccctccagaatagtaaaaaatttctgttgctttgtgacaaactggtgttttgtcacccagtttgtggtaatttattatggaagccctggaaaactaagacagagggtaaatgtgcaactcaggcagggtaaacagctagtgttgatgggtatcgaggtatcgtgtgtactttttacccctacagcagctccagaacaaatggcttgtgtaaatagagatagtggatgatgggggctgctgaaaaatagggggccagtagagtgttaaatacagggggtcagtagcccaacttttattcctcagctattcaaagaggaaaaaatactatcggcaaatgcatcataccctcataacatatacatgctcatgacagaacctttccttctattttctaagtgggaaatggcaaagacgggaatccaatttcagaggaagaaggactgaaacaaaaagtcgcaagagttctatttcagtcgttcaggccttaaggccatgtcttttccactaatttaagcacctaattacattctctctgaaattgtttgtgcatgacaattgccttgctgggatgacattccaccatctcgagtcttatctctacctagttaatatccctcagtacactagcatgaaacacatcttccctctagccttgatactcagaggtttttattttttagttgctctgtgatcataggccaagatataagcaacaataatattctttctcatgatattttataaaattgttttaactcttgcttttgacatcacagtatcttgctgacattttagatccaagtagaaggtcccaaatcttttgtattcagtaaagtggctgtgatattcccagcactcattggatgctaaacaaaaataaagacttggggatctctgggttatttcctatggctcaagatcagtctgaagatagttacagttggtcactaagaggaagagaaataataattgttcataagagtgaatgagcaggctagaaaaagaactctgaatttcttcatttcttctgctttccaaactggttggattatatcacttcataggtaagtattcttagaaagatgtaaatataggttagggcttcttttttcaaaaagtttatgatataatggggtgaaaccttgtcatgcacaaacaatttcgaacagaatataattacgtgtttaaataagtactaactaaacatactcttaaaaattcagctctgagaccacactgtggaaggtgggatagtataaaaaggcctcctggaggaaataaacttgagttgatgtaaatatttgccagtgcttgttagatttaaattttcaggaataaaggagaaaaccaactaaatggtaacacaacatttagtctacatatggttttatttatgtctaattaatttatgtaaatagagctatatcaactatacatgcatgtgataaaaagctgttagtgatatatatttttctgatttttaaaataatagtattagaatcctcactgatgcccttttgaaatggttacacaaacactgttcctttcaagtgccaaatcttttcttaactcatcatacaataaatgtatacactaggttaggagtaagggaattatggcctgcaggtcaaatccaacccactgcctatttttgtaaataaagttttattggtacaaagccactcacattcatttatgtatcttctacagttgtcttaccttgcaatggcagagttgagaagatgcaacagagattgtatagcccacaaagcctaagatatttactatctggtcctttacagaaaaagtttgccaatacctgcactaggctcctgggaatatactgtaaaaaattaccacaatgtctgtgggatcacaagcaagcgtatttatgttcaaagttaatacttttgtttgttttgtttttgtttttttgagacagagtctcactccgtcgcccaggcttgagcacgatctcagctcattgctggaacctctgcctcccaggctcagaagattctcccacctcagcctcccgagtagctgggattacaggcatgcgccaccacgcccagctaatttttgtatttttagtagagacggggtttcaccatgttggccaggctggccttgaactcctaacctcaggcgatctgcctgcctgggcctcccaaagtgctgggattacaggcctgagccaccatgcctggccaatattaatagttttttaaagttttttccaagtatttttgttttgttttccaaacttactctagttgggtaaagccttttcccctagaaattagtctgtctttccgcaagagaaaaaataaagtgagtgtttccatcagggtgtgaaattttctacaaaacaattttctaagaactggaagcttataaagatgcacacgatatttcattttttaacatatacattaaacatgattgcaattattctgaattttaaacactccagacaagtctttggttcctaaaatctttcaaatgacattaaaaaataaatgctgccattaaacttaaacagaatagaattctctaacattttaaaataattattacattgtagctaaattcccctaattacctttaaaagtataattctaattctagtcttctttttttatagatggagtcttgctatattgcccaggctggagtgcactggctattcataggtgtaatcatgatgcacaacagcttcaaacgcctgggctcaagtgatcctcctgcctcagcctcttgagtagctgggactacagtcttgtgtcacagtaccgggcctaactctagtcttaaatgttttcctgtgctgcatatggcagtggtaccttattatgcagtaggtataacttctatcgggcaatgctgtttttacattctattacttttataatttagcatgtataatttatacatactgatcatattatatattttataaaagcagggtcctggtaaccaccttttccaaacatatatgacccagattaagtgccagtgttaatagtacagtagagtagtccccccttattcacagaggatactttccaagacctccagcggatgtctgaaattgcagatggtaccaaaccctatatacagtcacatgctccttaatgatgggatgcattctaagcagtggatcatcaggtgatttcatcattatgcaaacattatagagcacactgtatttatacaaacctagacagtatggcctactacaaacctcgggtatatggtacagcctattgctcttagactgtacagcatgttatgggtacagcatgttactgtactgaatactgtaggcaactgtaacacaatggtaagtatttgtatatctaaacttagaaaagatacagtaaaaataggtcttaacttatgagaccaccactgtttttgcagttcatcattgacccaaacattatgtggtatatgactgaatactacgttttttcctatacatacatacctatgataaagttttaatttataaatctggcatagtaagaaattagtaacaataacaataaaatagaacaattacaacactatactataataaaaggtacataattgttgactctctctcaaaatattttattgtactgaactcacctattttgggatcatggttgaccatggaactgaaactgcagaaagtgaaaccgcagagaagggggactactataatctgtttgcagattaatcacaaaataatggaatgatctttcaacgttaaaattagcctactcaggccaggagtggtgtaatcctagcacttcgggaggctgaggtgggcagatcacttgaggtcaggagtttgagaccagtctggccatctagtagagatggtaaaaccccgtctctcctaaaaatataaaaattagccaggcatgatggcacatgcctgtagtcccagctactcaggaggctgaggcacgagaatcacttgaaattaggaggcggagtttgcagtgagctgagctcgcaccaccgcactccagcctgggcaacagagcaacaacaaaaacaaaacaacaacaaaattagcgtattcatttctttctgaatgaagcttaaagtaaataactgtttcttttctctttcccaaattatttagagtgattgatcatatcttctctatcaagaactgcatgacactcctagacccctagcaactgagaaaaataatttatttacacaaacatcctattaacccattgacatgtagttggaggtaaggcgatactattgtatgggttcctaacaaggtgcttcaccacttgggtttttacaatatttattttaaattcctattgttgaatggaaattattggtttcttgtttatgtttgagtatttaatctgttttttttaccacaaactatctgaaaatataaaactcataggctacccctgaacccaaagtaaatttataacataaattataaattcccaaaccaacagtggcatagggatcactatttcaactacaaatttaatggtattacctaccagaactcagaaactgtaactcagaaaaaaaacaagccacaggcacagctatcatttgcctcattctgagtgagactccatggatgtcaccttcaagaagttgcacgaagctgatacaacatcatatgcctttcctcagcacaaatgaccacatcctgtgccaggcagcatttttctgtctctgtggttaaaaactggtacaaattaatgtatagctcagtacagctggaatgttagttgaagctgtgatttgaatctcagaagttttagacaaataactcaatttcttggtctcttaagaaatttaagacaaaagaaaaagactctgagaaatgattttcttttcttgaaaaggagtctcactctattgtccaggctggagtgcagtggtgcaatcttggctcactgcaacctctgcctcctgggctcaagtgatcctcccacctcagcctcccaagtagctgggactacaggcacacacaaagctaattaaaaaaaaattttttttttgtagagatggggttttaccatgttgcccaggctggtctcgaactcctgacctccagaaaaatccgcccaccttggcctctcaaagtattgggattacaggcgtgagccaagccactgcacccagcctattttcttttcttcctttaagaaactcatgtatacacacatataactgacctagggctttcatttagtcacttactcaacaaatatttattgcacacctaccacagtagggccaggtactgttctaggtactgtaaatatctagcaaggaaaaaaatagcccaagaaggctggaaggagagtagacactaaacaaaactccaaagttatctgtgttcagtgtcatgcgatgaattaaaacagggctgtgttaaaatagtgactgaattgtcaggaaaagcttttctgaagaaatgacatttaagatgagatctgagtaacagagtaacattcataaagcaaaagtgattagatttatcaacataaatatcactataaaatgtgagcaatattaatgtgaatataatgctcaaaactcacaaaaaagcctggaagtaagtactctgtaatgctattagagactatctttgggtggtaggatagaggtggggttttcttttttctttctatttcaatgaactttccaaactgtggtataatacaaaaacatatttggtctttgttcctgctcccaggatcaagcacagaacttctaagcccttggaatttcctaagtgataggagtattgttttgctttgttttgttttgttttgtttttctcactagatcctcctgcctcagcttctaagtagcaggggcaggagtgtcttttgtattcataacgagcccctttcaatagcaccttagattatgctaacgaggtagctgaggctggggccactagacagcctcaggatggagctgttcaccagaaggacctggtaattagagcgttggacctttcagccccacccagtgacctcagggaagaagagagaggaaagggagctggagattgagtcctataaacgttcttgaacaacaagattcagagagcttcaggagctgggggtgtggcatgcccagagaaagtatggaagctccacgtcaccccttccttgctctatgcctcccttccatttggctgttcctgagttgtatcttttataataaactggtaatgataagtaaagaaactttttgagctctgtgggtcattccagaaaattactaaacctgaggaaggatgtgggaacactcaaatttgcccaagttggaagaagtgtgggtcacctgagggcctggtacttgagactggtgtctgaagtaggggcggtctgtgggactgagcccttaacctgtgtggtctgtactaattctcagagttagtatcagaattgaattgaattgttggacacccaacaacggaatggcctagagatttggttgtggatggaaaacaccccagaattggagtgggatttgctagatcagcccaggctcacagaaacatatggtttggaaggataaaataaaagggtaggggatgaggaaattttgattcctgagtggccatatagtcacctaaggagcagcaaaggggctgtgatcagttactaaaggtaaaagttaccagtgaaatttaaagatgaacccaactcctggggagctggttcactgaatgcttaaggaaatgcaaactaataagaaaaaagtgaaatacacaatccaatggttattgttatctgcaacagctaaaatgaaagttaaaaagagtgttgggttggaccttgatgctgaaccacgctcagattctggtgggcctgaacttcggatgctagacccaaagctgcctctaatggaaaaaatatgtgggaaaaacagaaaatacctctaagatctctggtcaccaaaaagagagtccaggtaggggagggcaaaaccaagaaactactgaaaccagggggtatagtgtgaaagagttactttattttgtagatcagtaccatcagcttcctaaagaattttgactaaaatgaattgtaagaataaataatttaggggcagtatcttggcttttaaatgcttcagagtggaagagcatgtttgggtttatataggatccacagctcactatggaacaatcacagatggctacacatgatccagacacagagcaggtcattcctaagggaacagctgacctggtggaccagataagagccattataaggtctatttaccctgagaaagggaactatctgacttcccctttcaatgccaactggaataccccagatgaagcagctgatatgcttcatatgcaagccatgtggaactggctttgtgataatcaagattcacacattgaatatgcccattacccaggtgatatggtttggctgtgtccccacccaaatctcatcttgaattgtaagccccataatcccatgtcataggagggacccagtgggaggtaaatgaatcatggaggtggtttcccccatgctgttctcgtgacagtgagtgagttctcacaagatctgatggtttaatgagtatccgatatttcccctctggcactcactctctcttctgccaccctgtgaagaggtactttctgccatgattgtaagtttcctgaggcctccccagccatgcagaactgtgagtcaattaaacttcttttcttctttataaattacccagtcttgggtatttctttcttttttttttttttttttgagatggagtcttgctctgttgcccagcctggagtgcagtggcgcgatcttggctcactgcaagctccgcctcctggattcacaccattctcctgcctcagcctcctgagtagctggaactacaggtgcccaccaccacgcccagctaattttttgtatttttagtagagacagggtttcaccatgttagccaagatggtctcgatctcctgacctcatgatctgcctgcctcagcctcccaaagtgctgggattataggcatgagccaccgtgcccagctgggtatttcttcatagcagtgtgagagtggactaattcagtatattggcaccacagagagtggggtgctgctataaagatacccaaaaatgtggaagcaactttggaactgggtaaaagacagaggttggaacagtttggagggctcagaagaagacagaaaaatgtgggaaagtttggaacttcctagagacttggagggttcagaagacaggaagatgtgggaaagcttggaacttcctagagacttgttgaatggtttcgaccaaaatgctgacagtgatatggacaatgaagtccaggctgaggtggtctcagatggagatgaggaactgcttgggaactggagcaaaggtaacttttgctatgcttcagcaaagagactggcagtattttgcccctgccctagagatctatggaactttgaacttgagagagatgatttaaggtatctggtggaagaaatttctaagcagcaaagcgttcaagaggaagcagggcataaaagtttggaaaatttgcagcctgacaatgtgatagaaaagaaaaacccattttgaggagaaattcaaaccagctgcataaatttgcataagtaatgaggtgcctaatgttaattacaaagacaatggggaaaatggctccaaggcatatcagagaccttcacagcggcccctcccatcacaggcccaaaggtctaggaggcaaaaatggtttcctgggctgggtccagggtcaccctgttctgtgcaggctcaggacatggtgctctgtgtcccagctgctccagctgcatctaaaaggggcaaaggtacagctcaggctgttgcttcagagagtacaagccccaagccttggcagcttccatgtgatgttgagcctatgggtgcatagaagtcaagaattgaggtttgggaacctctgcttagatttcagaggatgtatgaaaacatcggatgtccagacagaagttcgctacaggggtggagccctcatggagaacctctgctagggcagtgcagaagggatatgtagggtaaaaccccccatgcagagtccccactggaacaccgtgtagtggagctgttagaagagggccaccatcctccagaccccagaagggtagatccattgacagcttgtgtcgtgcacctggaaaagctgcaagacactcaacgccagcccgtgaaagcagctgggaaggggactgtaccctgcaaagccacaggggcggagctgcccaaagccatgggagcccacctcttgcatcagcgtgacgtggatgtgagacatggagtcaaaggagatcattttggaactttaaggtttaatgactgccctattggattccggacttgcatggggcttgtagtccctttgttttggccaatatctcccatttggaatgggtatatttacccagtgcctgtacctccattgtatctgggaagtaactaacttgcttttgattttacagacttataggcagaaggggcttgccttgtctcagatgagactttggacttggacttttgggttgatgttggaatgagttaagactttgggggactgttagggaggcatgattgtgttttgaaatatgaggacatgcgatttgaatgggggccagggcagaatgatatggtttagctgcgtccctacccaaatctcatcttgaattgtaacccccattatccccacgtgttgtgagaaggacccggtgggattgaataatggggtaattgaattatggaggtggtttcccccatgttggtcttgtgatagtgagtgagttctcataagatctgatggcttttttttttttttccttttgagacggagtctcgctttgtcacccaggctggagtgcagtggcgtgatcttggctcactgcaagctctgcctcccaggttcacgcaattctcctgcctcagcctcccaagtagctgggactacaggtgcccaccaccacacctggctaattttttgtattttcagtagagacaggttttcaccatgttagccaggatgatctcgatctcctgacctcgtgatcctcccgcctcggcctcccaaagagctgggattacgggtgtgagccaccgcacctggccaagatctgatggtttcataagtgtctggcatttccctgctggcactcgttctctcctgccaccctgtgaaaagctgccttctgccatgattgtaagttttctgaggcttccccatccatttggaagtgtgagtcaattaaacctcttttctttataaattgcccaatcttgggtatttcttcatagcagcatgagaacagactaatacaccaggtcatggtaaatgccacggttaagtggtgtcttaagaatgtacatgtcagatatgatatggtaaagtcagtgtggacacaaagaaaattagaacaaggcccagaaagaagtttatcacattcacaggtcccagagaggtggttattatgtgctatgcaagatcacaggagaaagcaccagtgttggtcaggaggcagaaaagaggaatgaggaaaaaccttaggtcagagccttaattggggtttctgtggaaaaggcaaggcagggctgggtaaacagtttaggattggctagttttaataattctggtgggctctaaagcatagagatggtctctggttgactggtatctggccctgggatgacttagggtaggtgaaatataggcttggtgtgtgagaattgggtaatggcttatggcaaaaacctgtgagtactttccagcaatgacaacaattggattttggaccagagaatttccatttgaggggaaattattagcctgctattgaatattaattgaaattgctcttatgattgaaggacaaaaaaataattttaaaacctaaaatatcaacgaagtcttgggtgatgtcagagaagtgttctaatggggagagcattgcccagaagagttctataataacatagaaatagtttatagagaatcatggtaccttaggaatgaaaggatgatatactcaggggcagggatcctcttttcccctacaattgactttggaactatgtgaggagctgctggattctatcatcacttagacagtgccctataaagtagtctttgaccaacaaagagatgcttgatttgtggacggtagtttttttgtttgttgagacagggtctcattctatcatccagcctagagagcagtgacacgatcagggttcactacagcctcaacctcccaggctcaaacgatcctaccacctcagtcccccaagtagctgggaccacaggcatatgccaccatgcctagctaatttttaaatgttttgtagagacgaggtctcactatattgcccaggttggtcttgaactcctgagctcaagcaatcctcctgccttggcctcccaaagtgttaggattacaggcataagccaccatgcctggctgtggatggtagttttaaggtaaatggacaacatcctgtttggaacaccacaactgtaattaaagaaggtaaaaacaaatcagcttggtgagctgaataatctgctgttttcctagaagtgatggaagaactgaacagtgatacatgcccatatgtttcagtttctgattcatgggcaatggccaacagcctggccatgtggtaaggcaagagtgcaatggaaacttggcatattaaagggactctcatatgggacaaagccctgtggaaatcactatgggaatttgaggggtgcattaaagtaggacatgtcaatgctcggtaaaagaccccccttccagatttggaagctgatcagaaccaattagtaggtatcacagtgtgcgtgtttgaggtgagcacgtgggtccataaaatgagtagacaggatgggggatgctacagccactgcagaagatgggctgaatttggacatatttcccttggacctcctgaggcacaaaatagcaacaaactattatgtctgccaataagagagacagttactataggtgactatggggaagattccccagggggaagaccccacacatagttggcaagtggattgcattgaagagccaatgctggtagtcccaagggctacaaatcatttttgtttttgttctttttttgagatggagtcttactgtgtcacccaggctggagtgcagtggtgcaatcttggctcactgcaacttctgcctcccgagtccaagcaattctcctgcctcagcctccccagtagctgggattacacgtgagtaccgccacacctggctaatttttgtatttttagtagagatggggtttaaccagttggtcaggctggtctcgaactcccaacctcaaatgatctacctgcctcagcctctcaaagtgctgggattacaggtgtgagtcaccacggccggcctgttgttgttcttttgagacaggatctcactgtgttgcccaggctggagtgcagtagcaggatcacagctcactgcagcctcaacctcccaggctcaagtgatcctccagccttagcctcctgagtagctgggactacaggcacacaccaccacacctggctaatttatttgtattattataatttttttttatagagatgaggcctcaccatgttgcccaggctgggcccaaattcctgggctcaagagatcctcctgcttcagcctctcaaagtgctgggattacaggtgtgagccactgcacccaacctataaattgtttttgacggggataaacacagactctggaaggggctttgcttacctggttgtatacacaaatggtcagtaccacgaaagaaccagaacagaagatattgcaccaatttgaatggctgagccacatttctttagactaaggagcactctacttacagcccataatgtcaaacaatgggcaaagagctatcctcctcagagtagtagtttgatagatatctaaaatagggtaaggtataggtgtgaagggttggtttatgcatttgcacaagtgtgaggtcacattgaaatgagctaagggagtgttcccactaggtagattcctctgtttttctggtggattagggaagaggaggtgggggaggatgctgatatgactatacaattcttgccaaagaggaggatattggtgtgatgactattctttttttccttccctacattgtcacatcagctttctctttcctaccagatgcagtggttgcaataccagcactgtaattacaagtgccagaaacagagatgatttctaaagcaagaaagtgtaaccgtagctttaaacctttatgtcagaactcctaagggcctgatgaggcaggctgtgcctttaccccatctggcaaaattggggttaacattgaatgcagatgtattgcctagtggtagaaatagcccactagttccgtacctgtgtaaccctatcctgtatgtatgggagttgactgagggagaggtgcttgctagactagtattgctgcctacgatctagaccagtgcagtggtcaaacctaatattcctcccaaaggtgggaaagtttgggcataaacagtaagaaggaggaagagtagctgagagtaaaggaatgaataaatgagttatgtaacaagtcctgtgagtcatcctagcaaattattaaacatgtggaggggagtccccgattttgtagctaagtcagacaaaagtgcaggtaacctggggacctggtacttgagactgttgtctaaagtagggagagtactgtgcagtactgtgagactgagcctgtaacctgtgcggtctacgcaaacatcaggaattacaatcagaattgaattgaagtgggctgggtatggtggttcatgcctgtaatcccaggactttggaaggctgagtttggcaatcacttgaggtcaggagttcctggccagcctggccaacatggtaaaactccgtctctattaaaaaaaatacaaaaattagccgggcatggtggtgggcgcctgtaatctcggctatttgggagactgaggcaggagaatcactaaaacatgggaggcggaggttgcagtgagccgagattgcgccactgcactctggcctgggcgacaaagtgaaactccgtctcaaaaaaaaataataataataattgaattgaattgttggacaccaagtcattgtcggaaaaccagaaaattggtttgttggtgtcagaaaacaccccagacaaactttctacaataaacatgtattacttttataatggaaaatagtcaaacatcatgttttaagtgaagttaatataattggaacactggataagcaccttaaattctcaaaatttgctgataacctacaactatgaaatgcaaatatttgtgaaattaacaaaacagaatcactcctaactaaacctacaattgcaagttttccttggagagctgatttcttctctacactaagcctaagcaatatctacaggcatcagtgtttagtctgcacactacggctcacctcctatgtcttcatcttcattggctgggccttctccactgtccacattttccatttcatgagatttggttaaactgtagtcattcaaaaccgctgcactttctaaaagataaaaggaattttaagtatgtggttcaacgttaaaggatttttataaatatatattaagtagacccccatttaactttcagcttcacacaatcctttagtgacagatagtaccccttcacacatacccaaaagggatgtatacatgaaaactcttgaggtttagaaataagcccagggttcgcagtggctcacgcctgtaatcccagcactttgggaggccgagatgggcagatcacctgaggtcaggagttcgagaccagcctggccaacatggtgaaaccccatctctactaaaaatacaaaaattagttgggcatggcggtgcatgcctgtaatcccagctactcgggaggctgaggcaggagaatcacttgaactcgggaggtggaggttgcagtgagccaagatagcaccactgcactccagcctgggtgacagagtgagacttcgtctcaaacaaaaaaaaaagagaaaagaaatatgcccagggttcatgtaccctctgaatacacacaactttcttgaatatttctttcatctgagttaaagggcactcatgttccttctggagaaaaactatctctccattggtatatctcacgatattcagtaggatgccattgctatttatgacaaagtagtgaccagaaatactaagcgtgcaaacactggcataacctaatttgggaaagatgctttcctaggaggaagatctgtaagctttctgtatgccaaattctgtttttcccttctgttcacattataaatgtgattctgtggaaaacatattggaccccaagtttctttatttgtttgaacatttactgaatgttgacaaggctacagatatgaataagtcattatgtcttcaaggagctcatactttgagatatagataagagaagcccacaactctaacacatggtaggctcagacaaaggattaaataaaggaaatacaaagtgttattaaagttcataagtgaaagggagcagacataataaagacatgcttaaacaaacagcaaacttgttacaaaataagtttaagagaaatgtataataaatattgataatactagaagaaaaaggaacaatgcaactggaattattttcacatataggcatagtagcttaacaaaaagatgatagcagaagaaatgaactgaaaagttaccctctttttatctaactccttcccaatcttcaataaaatatttgctgagttcccattaatataaaaaatagtcaaagacactgaatcctgtggcactgaggctgggctgaagtagggaggtaactagaagctctgcagtggcactcctttcagctgagccatgaccaaacacacgcgggagcgaaagagaaacacgtttcacaaaacccatcactaagagcccctgaaaatgtggtcaccatggactcagtgtttgatttatgaatatctgaagtttctaatttctgcatattatgatgtatactctgtgaactctaagataccattctaaacaatggttcacttttctcaagcctgaaatgactaaaatatagtggacacctaaacaattaatatgagatttaggttcagttaaaagatgtgattggccgggtgcggtggctcatgcctgtaatcccagcactttgggaggccgaggcgggcggatcacctgaggttgggagttcgagaccagcctgaccaacgtggtgaaaccccgcctctactaaaaatacaccaggcatggtggtgcatgcctgtaatctcagctactcaggaggctgaggcaggagaatggcttgaacccgggaggctaaggttgtggtgagccgagatcacaccatcgtacttcagcctgggcaacaagagcgaaattccgtctcaaaaaaaaaagaaagaaagaaagatgtgattacaagttacagtaacacaaaaaggcatttcagtgataaattaaattttgtaatataatgtaagctttgattcacacagtgagttaatcaatggaggacacagaagttattttcaggaaataaattattgtaaatgtttataatttattctagagcagggatcagtaaactatggcctgaggtacaagtctgaccatagcctgcttctgtgtgggcccaagaggtaggaatggtttttacattttttaagggttgtaagaaatacaaaaaataatacgtgacagagaccatatgtggcctgcaaagtctaaatatttactatctggccctttacaaaaaagtttgcagaccactgttctacagtaaaaatcgcaagtcattcaaatacaagctactatattattcaacaaaaactgtcttcagagcaatgagctgaaaaatcaaaaacaaacaaacaaacaaacaaacagtgatcaacattaggtagtgtatgtttggccctaagatgctaaagaacttacatgatctaaatggatgagttattttttcatcagcaacagacaaccatatttaaaaaaaaacacacacacatttccatagcatttttactgcaaccagaataagcacattcctctctctttggtattttttttagtaaaggtatatttccagagaggaaagacctgatgttacctgcgggcacagactgctcctgagtgcttttcagttccgcatttgtttgtatatctgaaaagaaagaggttataaatattagctacttagggtacatttctacaggtttgagcattccaaatttaataagggataccatttcggaaaacttaacagcagaattcctctttcagagcaagattactctttctctatattctccctaaaagcctttcaaggagcatgaaaaaaaaatattgatgcagcaatgttactctaagaactttctgccagagatctacttacaccaagaacaatatgcaaaaagtgggttccattagaaataatttcatatattctttattcttccccaatattttattatgaacacatagaaaaaaagagttcaaagtggtatatatatatatatgtacatatatatgtacatatatataatgaaatactattcagcaattaaaaagaataaaatcatgtcatttgcagcaatatggatggagctggaagtcactatgttaagtgaaataagtcaggcacagaaagacaaatatcacatgttctcattcatatatgacagtaaacacgttgatctcatggaggtggaaagtagaatgatagacagggtgtgtgggtgggaatgggggatgaagagagattagttaatgggtaaaacatatagttacatagaaggcataagctctaatgtttgacagcagagtagggtgactatagttaacaacgacgtattatatatttcaaaatagctagaagagaggacttgaattgtttccaacacatagaaatgataaatactcaaggtgataaacattccaaattccctgacttgattattatatattctatgcatgtaacaaaatatcacatgtgccccataaatatgtaaaatattatgtatcaataaaaaattttaaaaaaagaactgcacagttgaacatccattactcaccctctggattctacaattaacattttgctatttttgctttctcacatatgtttccacccattcatctctcaatccattcatcgatccagctttttcaacgcattgcaaaataagttgcagatatcagtatacctcagtcctaacatttcagcatgattattattaactaaaattcaatatctgtttacaagattttaaaaagtaaattttacatacagtgatatgcatggatcttaagtgtaccattcaatgagtttttaaaaatgcatatcctcatgtaatgcaaacccctatcaagatacagaacattaccatcatcccagaaaagctccctcacatctcttcctagtcaattcccacccacatactccagagacaactactgttttgactttttccaccatagattagtttagcctattttagaacttcataaaaacagaatcacacagacatatggtataaattattttgcccgaggcttctttcactcaacataatgttttgagatacatccattctgtggtgtttatcagtagttcattcttttttattgctaagtagtattccatatgaatatcccagtttgtttatccattctcctattgatggacacctagactgtttccagtttgggctatttataagtcaaactactatgatattcctttttaaaataataaacttttaaattttagagtagttttaaatttatggaaaaattgcaaagatagcacagagagttcccatataccccacacccaatttcccctattattaacatcttatattagtatggtacatcagttataattaatgaatatatattcatacattattactatctaagtattcagatttccttagttttcatctaatgtcctttttctgttgcaggatcccttccaggatcccacattacatttagtcatcttgtctccttaggctcctcttggttgggacagtttctcagactttccttgttttgatgatcttgacagttttgagtactggtcaggtattttgtagaatgtccctcaactgggatgtgtttgtttttctcatgattagactggagcatgatcatccttgcacaagtatttctgtggtcatatgctttcatgtctcttgagtcaatacctaggtgtggaattactgggttatagggtaggaggcatatatctagtttcaacacagtgaaactagaacttgttcaaaagtgcttcttccctctactttgggcttaacttactctgcttctgccctcttaaggtgaaattttagtgactgactttattcctttcttcttttctaattgtaaacatttaaagctataagttttcctgtaagcattgctttagctgcatctcataaatgctgatgttttgattataattcagttctaatttccctcgagtcttctgtgatccactggttatttataagtgtttaatttccagatatttgggggaattcgggaattctttagctaacttgttattgaagtcaaattccattgcactacagtcagagaacacagtctgtgtgactgtagtccttttaaaagtattaagactggtgttcttggtgaatgtgccatgtgtagttgagacatatgtatgttctggtttttgttggttttctttgtttgttttgttttgctttgcagatctggctgaggctttattttggaggaaaaaaaaatgatgtaattgttttgtagctggaggcatgggcaaggggggtatcccaggcagtaaactccccatgggtgggctgagggttagggctgagcctcaggtgggtctcctgttccctatactcccctgcacagtggcctcctccacaggctctggagaagccatgggagggggtaggctgggaggggctgctatggcctttcacctgggcaggacatcagaggactgggacaccagcttcccatcgtggtcttgatcttcttcacaaccacagccctagagaagcaggcacagccaaaggagctggagcccccgccagagccaaagctggatcccaagccatagctgaggccagggcttgtaaggcccctgtaggctgagctcagcccacctgagtagcccctggtggtcttcatatggatactcatgctctgcatcccagacttcagctggctctccttgccctccagcaacttcctgtaggtggcgatctcaatgtccagggccagcttgatggtcatcagctcctggtacttgagcagctgacgcgccacgtcctgcttggcccactgtagggcggcctccagcttggaccccctggcattggcatccttaatggaccgctccccacacatacacaatggcggcctccagggaagccctctggcctttgaggccctctgtctcagactggagccggctgatgttccagtttatcttggagatctccgtctttgtacaacgcaggtcatcctgtgcttcccaggcagggtctgcagctcctcatacttgatctggtgcatgctgtcagccttggcctggctgcggttggcgatcttctcatactgggcctcgacctcagcaatgatgccgtccgtgtccagggagcagctgttatgcgtggacagccccacagatgtgtccaagatctgggactggagctcccagatctcctcttcatacagctgcctgaggaagctgatcttgtaagcttgccatccaggtaagactccatccagctccaccctattcatgtatgcctcatccacatccttcttgatgaggacaattttattctccatctctgtatgcttactgatctcatcctcgtacttgttcttgaagtcctccaccagcccctgcatgttgccaagatctgcctccagtttcagcttctcctggcctagagtgtccagctgccacggaggtttgttgatgtagctcttggacatgttgtccatgctgctccaagctgtcttctgctgccgcaggaggctctacttggtctccagcatcttgttctgctgcttcaggaaccgcgatgaagggggcaaacttgttgagggtcttaatctgctccttctcctgagtgcacacggcctggatgttggggtccacctccagcttaagggggctcagcaggctctggttgaccatgatggctgtgatgcctcctataaccaccagctcggccatagcctccacccagacccatgctggcacccaggacaccctggacactgctgctgctgcccacttgggagaagctcgaggaactgacgcaggcaccaggcctactcatgttggagtggctgctgaaggtccggggccagaggtggacaccctgtagaacttctgggtcaccctgatggacatggtggaggcgggagtggaggcaggtgggcagaaacagggggagattcaataagtagtggagaaactgcttctaggtattctgcagttctcaagtgtactgtttaataaatgttaattaaatcaaggtagttgacaatgtcattcagatctatggatatactaatttttgactagttgtttagttgctgaaaaaggagtattaaaatctccaaatatgactgttgatttgtctatttctctctgttctagggactataaaatatatctttaattttccaggcttcttagagttaaaattatacacttcacataaaatgtaaaaagcttgcaaccatttaggcccatttcctaccctccaacctttatactatagttgtcatatgtatcacatctgcatatactttaaaccttaccatacaatgctaattcttgctttgaatagtcatattgtattttaaagattaaaatgaaaaaatagtactttctaattacccacatatttaacatttctggtgccttttttttctttttttgagatagggtctcactgtgttgccaggctggagtgcagtggcacaatcatggttcactgcagcctcgacctcctgggctcaagcaatcctcccacctcagcctcccaagtaactaggactacagaagcaccaccatgcctggctaatttaaaaaaaattcttttgtagggacgggggtctcactgtgttgcccaggttggtctcaaactcctgggctcaaatgatcctcccacctcagcctcccaaagtgttaggattacaggtgtgagccactgtgcctggcctggtgcttttcattttttcataaagatttgagttctgatctggtatcacgtccctacagtctaaagaactttagcatttttaatagtgcaattatctgagggacttttcttgttttcaattatttgcaaatgtctttactttgtcttcaatcttataggatatttttactagatatagaattctgagtttacagggtttttttcttaaaactttttttttttttttagagacagggtcttgctttgttgccaaggctgatctcaaactcctggcctcaagccatcctctcacctcagcctcccaaaatgggattagaggataaaccaccacacctggcccagtttttttttccttccagctcttttaagatggcattccactgtcttctgtcttctattgtttctttttcttttttttttttgagacggagtctcactgtgttgcccaggctgaagtgcagtggtgcaatcttggctcactgcaagctctgcctcccaggttcatgccattctcctgcctcagcctcccgagtagctgggactacaggcgcccaccaccatgcctggctaatttttgtattttttttttagtagagacggggtttcaccttgttagccaggatggtctcggtcttctgacctcataaactgcctgcctcagcctcccaaagtgctgggattacaggcgtgagccaccacgcctggcctgtcttctattgtttctgatgagaagtcagtgatatcttgtgttgttgttttcctataggtaatgtgttccttttctctaagtgctttcaagatttttctctttacttttggctttcagcagtttgaccataatattcctagctgtaattttatttgcatatatcccacttgggttcatggaacttcttaaatctgtacagttacgtttttcaccaaacttaagaaattttcagccattatttcttcaaatattttttctgttccattctcctccccttttccttctataagttcaattatatgtgtgttagatcttttcatattttcccacagttccctgagacattgttgttttatctccccacaatgcttttttctctgatattcagaaggaataatttctattttcatatcttcaagttcatttactctttcttctgtcatcttaatttgctgttaagcctatctaatgagttttctttttcagatattgtaatttttagttctagaatttccatttagttcattttaatttctctgctgaggttttctatttgtttattaaaagcatattttcctttatatccttttcatttttctctaaatgctttcaaatattttttctgttccattctcccacgcttttccttctataacttcaattacagaagtgtaattactatagtttatacaagttcttgtctgccagttccattatgtatgccatcttgaggtcagttaccattgatttccttttctcttgagtatgggtcatattttcctgcttcttcatatgaccacataattttggattgtatgctggaccttgtgaatgatatattacataaattgtgaattctatatgttcctctgaagcatgtaggaatctttgttttactttttttttaagagataggattttgctctgtggcccaggcttgagtgcagtggcatgatcatagctcactgtaaccttaaactcctgggctcaagcagtcctcctgcctgagtctactgagtacctaggactacaggtgtgtgccaccacatctggctcttaaagttttttgtagtgacagagtctcactatgttgcccaggcttgtcttgaactcctggcctcaaggaatcctcttgccttagcttcccaaagagctgggattataggcatgagccaccatgcccagtcctttttgttttaatttttcttctttttttttttcgtattttttgaaatgaaaggtctcatatatttattactgaatgcagtcaaccaacacgttcataagagattcagagagaaaaaatatattcccaataaaacatgttcaactctccagacagtggtgacattttcagcttgatatggtaacatgattgtgaccttgagacagcataaatatgtgtgccatctcatgtgcaattccttacagactcagcttggttcttttccaatgtctccttttggagttgtacctgattttattaccagttttcatctaaatccactgcggaatgggaagattttccttttgtttcttggccaggaatcacttaatcctgaaagtcttgtgagaagacatggtgagaagtggaggcaagcacacaccacgatggcggagaaaggaagagaggactgtttctttatttttattttttttagacagggtctgactctgttgcccaggctggagtgcagtggtatgatttgagccctcttcatcccaggctcaagcaatcctcccacttctgcctcctgagtagccgggactataggtgcaatcacagctcactgcaaccttgacctccctgggctcaggtgatcctcccaccttagcctctcgagtagctgggactacaggtaggtgtcaccatgtccagctaatttttctattttctgtagagtgggggtctcgccatgttgcccaggctggtctcaaactcctggccttaaggtaatcttcccgccttggcctcccaaagtgctagggttacagacttgagccacaatgcctgaccagactttttactttttaaaccttgcaactaacttgccttggcttaaactcaaactccgtctcacctgttgtgggcagcagctggggtgaccaaatgtcccaatatgcctggattgaggggtttcctagaacacagaactttcagagtcccaaagaaactgggatgagttagtcacctttgcagaagtataaatctgtttagttattttagcctcagttgggctatttagagtgtaactctacacattagtggatcagccagagaatttatatccaaaaaagccctctctggctttctccactgcagaatgtctcccttcacttcccagttgctgtggttgttatggtttgtcaaaactgtggattttctatccactctgaggctgaaatggggcctgcccttgtataaaaggccataaaacaggctgcttttggtcatttttccagtgctttcaggtgataatttttttaatattttgtccagaatctatcattcttatccgtggaaaggttggttcaataggaggtactattccattacagaaattaaaactctcctttgttctttattttgactgtgatcatttactcaaaactatttagaaaagtactgatttaaaatggtctataatcaggtcatattccaatttttagtttaaaaaatacagtcactatagtcatattgtattctaatttaaaacttttaatatgttagccattagaggttagcaacaaagcataaaggcaggggaaatacacatagtttaaaaatacgcaaaggagcagcttggcatgggatgtcaaaatccaagctggatgagaaaaatgtccatgcaatgaataggggtagcccagggtgggctgctggagaccagccagcatgaagagtgtgtccatgcagggtaggcagtgtgaatgaggtaaggagggtttcaggccaggtgtggtggctcatgcctgtagtcccaacattttgggaggccaaggtgggcaggttgcttgagcccaggagttcaagaccagcctgggcaacatggcgaaaccccatctctacgaaaaatacaaaaattagccaggcatgttggcatgagcctgtagtcccagtcactcgggaggctgaggtgggaggatcacttgagccctggaagtcgaggctgcagtgagatgagacagtgccactgcagtccagcctgggcaacagagagattctgtctggaacaaaaaaaaaaaggcaagtttccacatggagggacagacagcatgaaaagtcagagctcaaacagtataagaggacatgcagggaggaggactgcctggcctggactgctggagcctgagagggaatgaagaggggaatgaagagggaatgaagtggctggcagcccccactagaggctaaatggaatgaggagaacttcaatgccaggagtagtccagtgcaaagtaccaaaactcgagtggggtgaagagggcatctacattttaggggcagtcctgcatggggctgtcagagctcaagcagttgagaagaatgtccacacagagtggaggccacagtacgggattatcaaaaccaaatgagtcaagcagagcaactgtgctgagtaggagatgccaagtgccaatgggagactggttgtattacatagtggaggaatggtcaaataagtaaatataataaggataatgagagccaggtttttctgtgagagaagggagttacaaatatggaagcctgtggtcctgtattggaagtggatgtactggcatgaactcatggcttctactatatataaaaagataggccaggcgaggtgactcatgcctgtaatcccagcactttgggaggccaaggcaggaggattgcttgataccaggagttcaagactagcctgggcaacatagtgagaccctgtctctacaaaaaaatattaaaattagaagggtgtggtgaagtgtgcctgtagtcctagctactcaggaggctgaagcaggagaatcacttgaactcacaagttcaaggctacagtgagctatgaaggtgccactgcactccagcctggatgacaacaaagcaaaaaaaaaaaaaaaaaaaaaaaaccagataaaatatagatgtaaatgtgtgtatatgggtatacataaatacagtccctttccccgttcactgagagcacctaggaacagtgaaactacaatagcgtctagatattaacttctaaatattattctccatttaaaggaatgaggctccctgaagaaatggtttactccaagatgggcatagtggctcactcctataatcccaacactttgggaggctgaggcaggtggatcatttgaggcccgcctcagcctcaagtgtttgagacaagactggccaacatggcgaaaccccatctctaccagaaatacaaaaattagccaggcatggtggcgcatgcctgtagtactagctactggggtggctaaggcatgagaattgaaagtataagtcgggaacattttgctgtgccagaaagcaaggaagtgctcacagaatgaagtggatatcttaaaagtatagagcagtcatcctgaaggggtttccattggccaaatctgggacaagggagcataaaataataatagtattagactataactcattgggaaaaaaacagaaattcatgagtacattctgagtacattattcatgagtacattattcatgtacaaattcatgagtatattattaacattctgatgttaataaatgaataaattaaaagtgtggtgacagatgggatatttatatagtttcaaagtgcttctctccaaaaatacttattaattacaaggttgaaagaaaagagcacctatataatggaaaagcctgttcgatatcactgtaactgagcaaagttacatgtggtcatcatcagtaatgggacaaacaaaaattatgtgccttctgatagtgagtagaacacagcatcacttctgtgatattcctgccaaatatgcaaaacacaaatcaaaccataaagaaacaaccaaactcgaatttgcagggatagtttacaaagcagctggcttataatcctcaaaagtttcaaggtcatgaaagactgaagaactgttccagactgaaggagaggaaagagacatgacaacgaaaagcaatgtgtgatcctgaaccgaaatatcttgtggtaaagaacatcacagaagcaactggagaaacttgaatggggtctgaggattgaatggtagtaatgttgatttcctggttttgatgattttattgtgaaggcagggcacatactctaaagcataggacagggatagagcaccgtgtcagcaacttactttaaaaacttgcagaaaaaaagtttttttgtgctgtattgcaacttttctgtaagttcgatagtgttttttaaaaacgctaactatgaaactttcaactgcatgctgaaaagattcttaacggagggaaaaaaaaaaagaaagaacgaaaactagctcaaagctttcacatgagcaaccttcatgtgggaacatcttttagtcactacacagaaagatggcttttgatttggtgaactaaaggcaaaaggtcttggtcccctgaatattttaaaccctctgacatttaaatagctctcaatatttttaaagtgtcctttgtgtactgtaaatagcaccagaagtaactgagtgtagtttcgaagagaaaaatgagattctgactaccttagcattcataacaggaaaatcgcttgaacacggggggcagaggttacagtgagccgagatggcaccactgcactccagcctgggcgacagagtgagactccgtcttttaaaaaaaaaaaaaaaaagagataggaaaaccatctgtgatcaggtcacatgaatgttcttattagctactaaattaaaacacaacaacaagatagattgaagtgtatttcccccctaaacttcaaggtatttataagaacatgaagcccattcaaagacaggagtggacagatggtgaaggaactcccaaatgaagaccagaaacttgttaaatatttctaaatgcagcaaaaacatcttagtttttaattaatcattttgtaacttctttacacttcagtcccccctaacaaatccacaaaaagtttccatttgatggggtctactgtggtctttttaatgtgtaggcagtcaacatagctttgaaatattttccaaaagaatgctctacaaagttaagtaggaagagtccctatattgcttttgatagaaatatagtttcctgtactgatgtttatacatatctggggcaaatgatggaagaatcttggagtgggttaattttgttgaaatataaatctcatcaattgtctacatttctcctgttatttgaacagggaaagcatgctcctgcctcaaggcctttgcatttacccttccccctgactataatgctttcctcttagaagccacttggctcaatttctcttttcattcaagtatctgcttaaaagtcacctattcaaacaaggtttacctaattaccctacataaaatgtcatcttccattgtcattttctttcctcttacctgctttatttttctttataaaattttttcattatcaccatcattcatttttttgggggggacagagtcttgtttttttattttttatttttttgctcttgttgcccaggctggagtgcaatggtgcgatctcggttcacggcaacctccgcctgcccagttcaagcgattctcctgccttagcctcccaagtagctgggattacaggcatgcgacaccatgctcaactaattttgtatttttagtagagatggggtttctccatgttggtcaggctggtctcgaactcctgacctcaggtaatccgcctgcctcaggctcccagatcaccatcactcatttttttaaatctgtcttttcccacaagaatgtaagctccatgagaacagtgatgttgtctgttttgtattgctgtatcttcagcccctacactagtgtctgctcatgatggacactgaataaatacttgttgaatgaacaagtgaagttttatatctctattgttgatccctatgaacgcactagatggttttgcaaactatggctcactgcctgttattgtactgcctgtgaactaagaatggtttttacatctttaaatggtttttaaaaatcagaagaatacacttgaacattttacaaaattcaaattgcagtgttcatcaataaagttttattggaggccaggcacggtggctcatgcctgtaatcccagcacttcggaaggctgaggcaggtggatcacttagtcaggaggtcgagaccagcctggtcaacatggcaaaaccccgtctttataaaaaaatacaaaaaaaaattagccaggcttggtagcaggtgcctataatccagctactcaggagggggaggcaggagaatcacttgaacctgggaggcagaggtttcaatgagctgagattgccccgttgcactccagcctgggcaacaggccaaggctctgtctccaaaaaagaaaaaaaaaaaaaaaggttttattggaacacagctaaacccattcatttgtatattgtctatggctgcttttgtactccatcagccaactaagtagttgtgacagagaccatatgacctgcaaagcctaaaacattcactatctggtcctttacagaaaaagcttatggagccctgttctaggtctattactaatacttctatgtttactttcaaaaccctgcaattggaatttcaagagaaagttgcggttttcactgacgcagtaatcaaagaaataaaacatttagacagcacctttcatacaaagcactttacaaatgtcactgattgaaaaattaatgcgacttttcagagggtaaaaatatcgaccacaggatatccaaatatccagataaaatatttttaaatgaacatacatgtatgtatacaaatatatacttagcatcatgttttcatcaggatttttgggtatcattagataaaaccattttcttatttcatttaaaagccagagttgtaatctagcagaaaactctagttaatacctatttcatttgtctttttgctctttccacaactaaataaccaatctcctgatatgttttaaggtttaattaaaacataagtgttttccattaacaccttatctcttaaataacacatcttctaaaggacacaactagtctactactgagatactgacatatatattagactgtaaaagttaaagcttatttcttttgcagtgttccacagcactctcccattcatagctactcatagccattctagcaatctcaaattgttttctaccagtatagaaaacaagacttcatcacatgcttactaagagatgataatttcaaattcgtttttggctttttagattctcttttcattgacgatgacactatataaattttctcaccggttagtttttttaagataccaaggtttttttttttttttttttcagagtttctaacatttcatgtgctgtaaaacgaaagggggcagattataaataaaatttaaacttggaaatggcaggagtctagttaattgagatttcatggaagttcacatatgaatgctttacctattagttcaagtataaattagctatgaagaaaatcaaatatttacattagcaacaaaaatgtacaatcatgtttttaattctaatggttataaacttgcctttatttctaatactgtactattaaataattaccattgaattaagaatattagctaacaaaattttcctcttaatttcagagatcatatttctactccatggtctgttttcccagtaggaagtataagcactaaaggaaagcaaaatgtcaaatctcagaaagaatcctgtattgagtttgccagctgtcaggcaccagaggtgcctggcagctgccagaaagctatctctgaatgttgatattccattccttctttataatagtaaatggagtcctttatacccatacctcttttttaaaaagaaaaagtttatcttatctaaaatgttcacttttactttataattaaaagttttagaaattgaggcactgattataagaatgttttcagaattgcaacattaacacctgggactgtaaatgtggcagagaagcgttcgctgtcatttctgcaaaatcctttaccagttctccgtatcaccatcatatataatcattcctcaaattccatcagtacaagaacagttctgtaggatgaaaaatgatccctataaccgatgaaattagcatattagaatcgaaattattatcataactagcttacctctccttcctctgccatctgatgtttgaatgtcctctaatatccccctacttgggttatacagcctctgcttgaacacttcgaataatacagaagttattcctttccatttcagaaaaactctagtagttaaaagcattctttcttaaatgtagctgaactcaaatttactgaaatgtctatttcaggtcctagttcagctttctgggaacatacaggataagttatagctcagatgttaccacccagtttcctgaccatggtgagagctgtcttctgaacccgtttttgtttgcctgtggctctccaaaaacgtggcatcaagcactcagcctaatagtgcaatgagatttctttttttctcataacaattctggaagataaataggggcaatggcatttattattttccccattttacagacaaaatccaagatacaaataatgacaaaaaacataaaggccagtaatcgcccaagggcacaaagtcagtgacacattaagaagagaagcaggatttgtctcttgagttttactgttgcttcagagaatttaaatcgtgttttaaatgccttcctatacagattacagattttagaaggccagaactagaagaaattttagatccaattaatttcaaacaccctaactgactgtgcattattgctgattgaggggaaaggaagataacaaaaacaaagacatgcattaaagtgagagtaatccctccaatcatgaaatacttccttccctatttccttgggctaaggtaaatgttaagaaacatcaagactgcttgcttaaaaacaccagatcaaatacaaccaagttactgttccagttcttcctaccctccccctttaaaaaaaaataaagcattccattttttctcctagattaagtgtttaatgaggaaactgtagaccgtggggcacaggtgaactgctgacaactgttgttaaaacaacaaagtcagtgtctagtgttattttccttcaaaggtcagttacccttaagttgtagacaaaaacatacattccaattttaccttgtatatcacatgctaccaaatgaacatgcagagagaaaaggaaaaatgggcatttcatgtcattgctactttaaaaagatgtttctggtaaaatgattgaatctaacatattgaaatgaagacttgttttataactgtaaaatgcctagttttataactgtaaaatagctggagccaaaaatagaatcattaatttgaagtgggtaacagagctaaatatgaaagttgaaacaatcaaacttctagaggaaaacagaatattctcatgaccctggagtaggtaaagatttatttttctttttttcttagagacagggtctcactctgttgcacaggctggaatgcagtgacatgacgtagctcactgcagcccggaactcctgggcttaagcaatctgcccacctcagcttcctgagtagctgagactacaggtgtgcatcactacactcagctaatttttaaaaaaatgtttggagagatggggtctcattatgttgcccaggctggttttaaactcttggccttgaatgatcctcccgctttaccctcccaaagtggtaggattacaggtgggagccaacgtgcctggcaaagaattctttagcaagatataagcagcacttagtcacaaaaaagaagctgataaattaatcttcattaaaattaagaattctattcatcaaatagattaagaaaaataaacaagttacagactgggataaagtatttgtattacacatctgacaaagtacacattactggctgggtgcagtggctcaagcctgtaatcccagcactttgggaggccaaggcagacaaaccacctgaggtcaggagtttgagaccagcctggccaacatgctaaaaccctgtctctactaaaacaatacaaaaattagccaggtgtgatagcacctggaaaaaaaaaaaaaaagcccacaaaatcagtatgaaaaaagacaacccaattaaaaaaaaaaaatccagccaggcgtggtggctcatgcctgtaatcccagcactttgggaggccaaggcaggcggatcacctgaggtcaggagtttgagaccagcctggccaacatggtgaaactccacctctactaaaaacacaaaaattagccaggtggggcggtagtcacctgtaatcccagctactcaggaggctgaggcaggagaatcgctgggaggtggaggttgcagtaagccgagattgcaccactgaacttcaacctgggcaacagagcgagactccgtctcaggaaaaaaaacaaaacaaacaaacaaaaaaacgtgaatgaccagaaaaccttagacgcttcaggaaagaggatccaaaatggccgataaacataagaaaagacactcaatgtaattactcatcaggaaaatgcaaattaaattaaaaccacaatgaaataccactcactacacacccaaaagaatggtaaaaattaaaaagactgataatagcaagtgttaacaaaaagatgtggaacaagtataactctcagacattgctagtgggagggtaaactgatccaaccactttggaaactctttggcaatatgtatcaaacctaaacatacacctatattagaacccagaaatggtattcctgggggtgtgtgtgtgtgtgtgtatatatataatatatagtatattatatatgtatatatactatatgcatatatactatatagcatattatatatgtatatatactatatgtatatatactatatagcatattatatatgtatatatactatatgtatatatactatatagcatattatgtatgtatatatactatataacatattatgtatgtatatataatatatagtatatacaatatatagcatattatgtatgtatatataatatatagtatatacaatatatagcatattatacatgtacatataatatatagcatattatacatgtacatataatatatagcatattatatatgtatatataatatatagcatattgtatgtatatataatatatagcatattgtatgtatatataatatatagtataaatatatagcatattatacatgtacatataatatatagcatattatacatgtacatataatatatagcatattatacatattatacatgtacatattatagcatattatacatgtacatatagtatatagcatattatacatgtacatataatatatagcctattatatatgtatatataatatatagcataaataacatatagtatatatactatatatgtatatgtatatatacacatattatatatacattatatataatacattatatatatacatatataataggctatatagtatatatactatatattatatataatatatagtatatatacatatctaatatgctatatagtatatatacatatataatatgctatatagtatatataatatataatatgctctatagtatatatacatatataatatactctatagtatatattatatacgtatattatatatacatatattatatatacgtgtatatattatatacacgtatattatatacgtgtatatattatatatgtgtatattatatacatgtatatattatatacacgtatgttatatacacgtatatattatatatactatgtgtatatatatatatagagagagagggagggtcttgctctgcaactcaggctggagtgcagtagtgtgatcatggctcattgcagacttgacctcccagtattgggactacaggagcacatgactaggcctggctgatttttgtactttttcttgtagagatggggtttcaccatgttgctcagggtggtcttgaactcctgggctcaagtgatctgcccgcctcggtctcccaaagtgctggaattacaggcgtgagccagcgtgcctggccacctaggtatatattcaagagacatgaatacatataggcccaccaaaagacatgcaaaagaatgtctgtaatacagccaaacactggaaacaatcaattgtccatcaacatcagaaggtataaattgtggtatatccatactattcgatcataaaacagagtgaactactaataaatataacaacttggatggatctcaaaaatctattgaggaaaagaagctagaccccagaaaagcatatattgtaaaattaatttatatgaaattcaacaacagggaaactatctatgaggatacaagtctgaatagtgattaatttggggcaaagggggaaattaacaataaatggacagaaggaaaccttctaaggtgatgcaagtgttccatatattgatctggaaggttgtataaaggtgaaaaataatcaagctatatacaaaagatatgtgcactttaattatatgttattccttaatttaaagaaaatccattgaatactcacacatctccaaatatctaaatcctaaacctaagaaatgcaattataacagtatcttcttgcttttgaaaaaaactttgaatctcaagagtttctcatgattttgctacagaatttttataagttgcatctacaccaaccactcactgaatgggctccatatatagcttaaaactcacgtggtacagaaatttatttacatgtcatgcataaactaaatatgaagatattttcagtgatcactaatttcccaaacttccctgcaaattgggatttcaaaatgtttcaatattggcatttttctctcaataaacttacactacagatagtgtaaatgtcactcatctttgaaaaacaaaacaaacacaaaacctctcttaatccacatttccctccagcaacatcccactgatttctcttcttcaccctcatagctaaacttctggaaaaactggtctgtaatcaacgtttctacttcttctactcccattcccactctacccacttcgatttggtttccatccccaccactccacagaaaccacttttgtcaaggtcactagcaagtgttatgttgccaaaaccaaccacactctttgtccttatcttgcttgatttctcagccacattcaacatagctgaccacccactccttcatgaaatactcccctttcttgaattccgttacaccacactctgctggttttcttcctgtctcactgactgctctttctcttttgctggcttctcctctacctgaccaaatgaggtatgtctccaggcactatcctgagagcccttctctcaatatattctctgtttaggtgatcccattcattcccttggctttaaatatcactggctgggcgcagtggctcacacccatagtctccagcactttgggaggccggggcggacagatcaagaggtcaggagttcgagaccagcctgaccaacaaggtgaaaccctgttctctacgaaaaatacaaaaactagccaggcatggtggtgcgtgcctataatctcagctactcaggaggctgagggaggagaatcgcttgaaccccagaggcagaggttgcagtgagccaagatcacaccactgcactccagcctgggtgacagagtgagactacatctcaaaaaaaacaaaatatcatccatgtgctgaagaaaacagccaaagccacattcctatcactagccagacctcttctttagaggagaggtccctgaccctgcctccttccattactctccaaattagcattctttttatttccttcatagcacttagcataaatttaattatttcaattgttattacttgttctttggtctgtcttccttaccttaccaaattccataagggccaaagctttgtctgccttttttaccactgtattgccagtattttgcatatgtgacacaaaaaaggtattcaataaatagttttagaacgaagaatgaagatttctgacttttgaattatattgtataataaatgtattacaagattcatcaaaattaaactttataaaactgtcgttcttcaactatcttttaaaatcttttaaacaataaaaaacatacgttaagtacatatgtgaagatgacccaccactgatgcaatgtatgctatcagagtgatgataggttttgctgatactgtttaaactgtaggcaatgcttgtcaaaattttttttattttaaaaaaataacaggccaggagcggtggttcacacctgtaattccagcactttgggaggccaaggcaggtggatcacctgaggtcaggagttcaagactagcctgaccatcatggagaaactctgtctctactaaaaatacaaaattagccaggcgtggtggcacatgcctgtaaccccagctactcgggaggctgaggtaggagaatcgcttggacctgagaggtgaaggttgtagtgagccaagatcgcaccattccactccagcctggcaacaagagcgaaactccgtctaaaaaaaaaaaaaaggaagaacacggtggctcacgcctgtaatcccagcactttgggaggccgaggaaggtggatcacgaggtctggagttggagaccagcctgaccaatatggtgaaacctgtctctactaaaaatacaaaattagctgggcgtggtggcacatgcctgtaatcccagctactcaggaggctgaggcaggagaatcacttgaacctgggaggcggaggttgcagtgagccgagatcacgccactgcattccggcctgggtgacagagcaagactccgtctcaaacaaaaaaacaaagtcccaattgtaatataaaggtgaaataaatgacagtaaataatattctatatttcaaaatgtaaatgcaccagcacaattattccagaagacagaataaggtagatagacgtatttgtagaatcaccatgaatgcaacagctaaatgcagaaggatgcatgctgcatcaatttaaaaaaaaaaacaagcaaggaaataaaatttaaaaaacaaggaaataaagccatggatcaaatgaaaaacagtaataataatggtaaaagtggctaagctctaaactaaacaaaaaaaatcatcctctctcaatgtaggtggtaattccaatcctagataaatttgagtgtactaaaaccatgcaaaaatgcttcatgtttgaacataaaatggagttacagtctagaagtcattagacagcaaaaaatgtcactacgtttcagaaaaggaaggtattcctcttagaatgagggatggcttcctaaaggagatggcatttaggatagaccataatggatgagtgaggatttcagttggcatgattgtggtgctattaacagtgttgggaagtcaggagaagttggtttggattggagagaaaattagttcatttttggacttgttgagttggaagaacagcattagaaaaatggggagtgagggaaagcaatgcctgaacagggaacactaagcagcagtccagagtcacattacaggacagaagataccactggaaaggtactgaagctgtgttgtggagtatcttaaatgtccaaccaaaaaatatttaaaatggtgtctgagtaggagaataactttatgttttaggaagatcattctggcagcaatcctcaaaacagattaaaagaggcaagtctagatacagggttactagtaggaaaaacatgtaacggtctaaatcagtcattttcaaaatgtgttttatggaatccagggttgcagagggctgccacagggctgatctatggcaagaggaagataggcttagcagtggtctcttgctccttctccaatctctcatttggaacattacacttgcatctgatcccacataagattttggtataaacggtgtcctgttgcaaaaaaaacaagtttttgtcttgtttttgtgtctaatcctaactcttgttgaaatgtgagactaacagtgaaatacctcaaggtcatcgtgtaatcatcaagtctcattgtgtagagtagtagttataaaatctataagcactacatgaattcctaatatcaacttgttcagtcattatttgtcctattatatagattggatctccctccccaaattggattacgtgtaaaaatgttctagttgtttaggtctggggcaactaagtccatactaggtcattgatgtttgcaatggatatctatagagtcctttgagaatctccaaattccttttattgagatgtgcatactatgctattggcttggcacacttagaagctgttacttgtttgtgcattctggtctcctagccctactaattcaaatctgaaaaattagtcgggcagtattggcacatgcctgtaatcccagctactcaggaggctgaggcaggagtgcttcaccttattatttcagaacagtttttaattaaactactcccagaaacttgagaaaggatgataagtaatctttgcttcaaagttgaatcacaaaaatatttaacattcattttatttcattctgaacataaaaatcaaacaagaaatgccccaactttattataagtatttaagatttataatatacgatgatgatgtaacatgtattataatatacaatgtatattgtatatgtacaatataacatgtatattgtatatgtacaatataacatgtatattgtatatgtacaatataacatgtatattgtatatgtacaatataacatgtatattgtatatgtacaatataacatgtatattgtatatgtacaatataacatgtatataataactcttttaaatgcttgtaaggttacatgttacatgtctttgttagtgagtagttgattactatactgtgacagaagcatgtcccaagcagctgagccttagcctttacaggcacttaataaagtacagggaataagacagttagtaatattcttttttatttatttatttttttgagacggagtctggctctgtcacccaggttggagtgcagtggtgcaatctccactcactgcaacctcggcctcgcaggttcaagcaattctcctgccttgctggtggtggcacgtgccaccacacccagctaattttcatatttttagtagagataaggtttcaccatgttggccagctggtcacaaactgttaataatattcttacttaaataacttttacagcgtggtggctcatgcctgtaatcccaacactttgggatgccaaggcgggcggatcatctgagatcaggagttcgagatcagcctggccaacatggtgaaatactgtctctactaaaaatacaaaaattagccgggcgtggtagcgggagcctgtaatcccagctgctcgggaggctgaggcaggagaattgcttgaacctgggaggcagaggttgcaatgagccaagattgcaccactgcactccagcctgggcaacaagagcgagactccatctcaaaataataataataataataataattttacatgagaaaatatgcacaggagaaaaaagaccagcagcaccatgattttactcatcatgtttataaaattttaatatttggaaaaaaaagcctcattttgaggtcagaggataaatttatacactgatcatcttcaatactttaaagtctggaattttatgtgaaattcaaatgaaatttaaatcaagttagcccgtgaagcacctttgtggaactgcctacactgtatgtaagcatataaatcaactattagtgatttttagcagtctaggtcaagggatttcttaactaagagatagaggtagatgacagcaaaaatgactagttgttatatattataaaaattagttacttccagttttcatactggacaatattttccatcagttatgatgtaattccatatccataaaaatgttataggtttgtgagagtgatctttttctcatatccacaaactcctagaggaaattgttctgatgtgccaaatattctggtaaattaatagtctctctaatatacattacttcttaaatgaactgatgttgctgtgatagagtattcaaattaagtgatgttcaacaattttaagaatcaaaacatctattgtgaagaaaaggtttatagtggaaactgcagtgcttcactgaaataaaaaatgtaccaaaattattaaataaagccaaaagttagaaggcattgtattttgtggggggcatggattagaaaaatggccgtattcacgcattggatttagccaatacttcaatctcttctaccaaacctttaacagtacctttaacaaattagccagcaaaatttaccaatttcaatgtctctattttccttcccccctttactataaaagctgggcaagaaaagagtcaaatgatcaaacacacaggcaactcattcattaatttattaaacaaatatgactacaggcctactatgtgctggggactgggttgggtactagttaccaccgattataaaaagatccccagctacgcatggtggcacatgcctctagtcccagctactcaagaggatgaggtgggaggatcgcttgagcccaggagtttgagaccagcctgcaatgtagagagacctcatctcaaaaattaaaaaaaaaaaaaaagagagagagagagatccctaaactttggaaaataacagtctagaaggggctataggtgtattaatcaacaaaataaacaagaaacttagttgcataatccttagataattcagagtagaaaaataatagttttgttctgtttcatgagtgacagtattgaaatgttttccatttcttattttaaaagtttccttcattggctgggcattggtggctcacatctgtaatcctagcactttgggaggccaaggcaggagaatcttttgtgctcacgagttcaagaccagcctgggtaacatagcaagactatgtctctattaaaaaaaaggaaagaaagaaaagtttcctttgtaaacccacaataacctaatctgccaaaaatttcatctctaagaacactactaagtacaatttgtgacatattgccaattccactgttataaaaaatcactcagtaagctgattttaagtactgacaataagtaaagagtaatgcactttgtttcatatccattaccaagtacctagttttttgtttgtttgtttgttttgagatggggtctcacactgtcacccaggctggagtgcagtggcgcgatcttggctcactgcaacctccacctcccaggttcaaccagttctcctgtctcagcctcccgagtagctgggactacaggcgcctgtaaccatcaagtacccagtttttaaatatctcctggattggacacatatctaacataatattttcatatggtattggtatttaatataatacggtaattccatattattttcatttactgtataccactttggacttacattttttgttgttgttgttgagatgggttctcactctgttgcccaagctggagtgcagtggcgtcattacagcccactgaagcctcaaactcccaggtcaagccatcctcccacctcagcctcccaagtagctgggacaagtgcacaccaccacaccaggccaatttacttttattttattattattttttatgaaacagggcctcaccatgttgcccaggctggtctcaaattcctggcctcaagaaatcctcccaccttggcctcccaaagtgctgggattacaggtgtgagccactgtgcccagcccttaaattttttaagtaactttttaattaaaaaaaaaacttttaattttggatgcaaaaaccagatttcaattagactgaaaaaataacctcattcagaatcactagggataaaagtattttgatgagttatatagtaatattaattaataaagttatacacagattacttttcaaacaatctatatatattataaataaattataattattgtttcattattgcatcttttttttagtgatccaaaaggccttggtgtcatccttatgattttttttttttttgagacagggtcttgctctgttgcccaggctgtggcatgctcatgtcagtgcagtggcatgctcatggctcacggtagcctcgacctcccaggctcaagccatcttcctacctcagccttccaagtagctgttactacaggcatgtgctaccacacctggctaatttttgtagtttttgtagagtcagggttttaccatgttgcccaggctggtcttgaagtcccaggctcaagcaatctgcccgcctcagcctcccaaagtgctaggattacaggcgtgagccaccactcctggcctcatccttataatttctaattatcataaatataccagttaatatggagctaaatttaataaaggctaaatagcagagtacattctatggccttgtgatgtgtagggtctcttttcaaaataattaatgaatccttaggacaaaagacatttattgagcacctactataggcaagtttctgtgttaatcactcagttcttctcatacatggtctggaactatagcttgacatatgagccaattatcattggacatctatctaggccaggtgcagtggctcactcctgtaatcccagcacttgggaaggttgaggcggaaggatcacttgtggccaagaattcaagaccaacctgaccaacatagtgagacccccatttctacaaaaaatgaaagataataaatcagcaggtcatggcggtttgtacaataaattaccaggttatggtggtggatgcctgtagtcctagctactcagaaggttgaggcaggaggatcgtctgagcctaggagtttgtggtagcctgggcaacagagcaaggactatctctttaaaaataataataaaaaaaaaaaactggatgtctgataaaagatctaccaataatcaataatcttttagtcctaaataagtgtaagtatatacatttatatatgaatgaaaagtttataacaatgtatttttaaagtatcacttgaaagcgtatgctatttttatggcatcatctatatcttactgactgagaaaacaaatttctgctcatattcaatggatattttaatggactaattgcgatcctgaaatctgcttatgtaaatttaacagttaaaatttggctttacacaaaaaagaatgaaatcatatcctttgcaacaacatggatgcagctggaggccattattcttagtgaattaacacagaaacagaaaaccaaataccgcatgttctcacttatgacggggagctaaacactgggtacacatggactgttatgaattaatgtgacccccaaattagacactgatgaccccaaaatggggaagggtgggaggagggcaagggttgaaaaactacctataggacactatgctcattatttgggtgacaggatcaatagaagcccaatcctcagcatcacataatatacttatgtaagaaacctgcacatgtaccccctaaatctaattttgttaaaattggctttaagtgacagtctagcaaaaaatatccaataacatttttgttttccaagctttctttttcaattatacagtttaagtgcttaaaaaattactgagctttatcaaagaattactagccccaatctcctactttaaaaatttatttaaataaaatgcatcacaataaacataataaaaagtactttttcagcactattttaattgaatgcaacaaattctgagggccttctatgaaccagaaactgtccttcgcattcagtgtacaaaaacaagacacagtctctgttctccagaagcttaaagaccagagggggaataaacacctacatcaataaataatttcaacacaatgtggtagaagtatacacagaaaggagaggcccttagctgaggtgaaggaacatgagagactgggtaggggtgatcaccagaaggcactaggaggaggtcatcagaagaaggtcatcagagagccttcatggcgatgatgcctgagcagagtcttgaaagatgagtaggcataagcaagtagagaatgggtgaacataatagcaaagacatggaagcatgaaatagcatactggattaaaggaagtacaaacaggaattttgaaaaattatgttctaccaggacgccacggcctttctgtggcttttgtttcttaaaaccttcgcatttcatcctccatacgctcacaatggagggcaaacagattccatcatctacaggctttatctctgttaatctcagccatccagaacatggaaagggacctgaaacaaaaccctactaccacaaaatctatgtggtaagaaatataagctgacatcaagaaggagacaaaaattgtacaatatcctaggtatgtttggtgtaggggcattcagctcaaaacccctgtgagaatatattatggaataatatatgatctgatggtgagaacagtaactcagagttgccgagataaacttatctcttatgtaccttgcttataaagcagggagctgtgtaataaatatacttagaaaaatctttactcaatattgttaaaaataaaaatgttttacattaaataagaagtctgccattacctgtgaaattcatgtttgtgaaccacctcatttcccgaccataacagacagaagagatgttatagtacaaataataaaatttagtgattcataaacagtctttgggtagaaaatatttaaggtcacagattgtgagaaaattaaaaagttatagcttctgattttagtatattcattaaatcttcatttctacaagatttctatttcaaaagcttattcatctgacatcttcatacatagaaagtctcaataaattaattaaaagataaatgaatttgttaaatgactttatatgctgaaggaatgatatacagtattgcattgtacaataaactgttatgaatcaatgtgacccccaaattgggcagaaaataaaggtattccatgaagtattctactttcttacattgccaagagaggtatacactatagaccaaatctctaatctagactgagatcaaaaccacaagatgatataaaaattttttaaatatcaaaaacatgggccagattagtctattttgggtagctataatgaaccagatattttaccacatcaaatactctatacgcaaggacctgacattaaaatagccaaattcatataattaacctctttttaaaatttaaatgttaaagttttttcattaagcataatctatactatctatctccatggacctatagatttaatctaatcatgtaaacacaactttaaaaagttattgatctacattctctttccatttatagtctacacactctaaattaaattctacacaagttttcattcttttcttcttaagggagtcttcaggcttattaaacatctgtgttagtacaccaataacctaagatatgctatttagtttctttattgcacattaaataaatgaatttggaagtattaacatttatagagaaatactccagtttctatggatttacatgattctgtacattatccttgatacgtggtatggttacggctaggaaaaatagtgttggagtactgatttataatttcataaaaacaaattaatcatttgtaataattaaagcatatgagcttttcaaaaattatttttcccatagtatacaacagcccaactttttttccttgttattggccaataaaacctttgttaaaaattacacttcaataaaccattatttaaatgttaaaaatgcaaaatttttaaagttttcaagccctaattaaaaaaattaaaagcataaagtttttgatattttaacaactttatatactctagaaataaagctgccaaagatcagttcattgttaattagagattcttccattattatgaagaaaatacccacgatcttcatatttatcaaagtaacattttagttaggtgtcaatatctcatttttaatagaatgaaattctgaatttcttaatcccaccatccccccccgagttgagatgcatttgccattttcaaggttttagaaacacttgttgaaaagaccattgaagagtttacagtagcagtgtgaaattttaggtatcccaaggaagtacagaatgaaaaatgtttgagaagcaaggatagtgttacgactttcaaaattaattcatatgaaactcctaatgtgaacctgattttttgcgctgggtaaagaagactcattagaagatcgagttccaagggaactgcaaatgccaaccgctttaaaatgtacctttcccatatgacaccatttacccttggaagaaaacaagttactcagattagtctaattccaataaacactgaggccatgaaggaaaaaatatccaaaagggttgattattccaccccagatttgcagccatttcagggacaccccttaagtgctcttcctctgcagatgtagggtagaccccccatgtctgacaactctttagaaataaaattgcgaagaagttatcactttccaaagggcgggggaaggacaagtgagagacgttaagagaaccgacgcgctttgtcctctgaaatacctcatatttacttttgacaaaagaagtaaatagaagcaaaactgagattcagaagaaactctttctactgcttgcacaggttaagtttctcaaagaccccggagaaaagaagcgggctggaggctcaccttccatgtcgctgccgggccgggctggagctgccgctgtggctactcggcctctccacgtgctcctgccgtcgcctggactcagcgcgcagctggcgggagattcccggcgcggggagtccccgggatccggcagccgcgtcggcgcagactgaaaagggcaggagccggcgacctgccggtgcgcggggttacagcggcgctggctggcggcggctttaaaggacgctggccgcggagtgccgcgggttccgcgcctccagccccctttcgaatgtcaaacccaaggaaccccgacaggatggaaatgtcgcatcactaaattgtctcaaaatgtctattttagaaggataatggatgagaaaagtgacatcacacggagggtcgggggtcagccttgctttcttggcaagctgaagttcaaagacgtttatcttaaattgaggaagatctggaactttttgtctagattcagtgataacagccgtggaaagtatcaatgagaacccccttctttcaaagtatttttttttccttcctcactttttcatttcacatggtaaaagtttttggtccaagttttcagacagttggaaaggattttggcacttctatcaattcaactttttaatttttggaagcatttatctcacttttgttttccctctgggaactgcttgatttatttgccaccactcacgcaatactacccactctatataaatagagggagtgttttatagagtgtgtttattttctcccagcctgccttcttctaaatacacaccttacaaaaatacatatatgatgtaccagaaaattaagcaaagaaagtagagctaagggtggaaggtgggggcagtaagattgtaaaattaacttaaagatgttagtatacagatatgtatcagtcaacatcttctcccaacaccctccctactgtccagaggtaaagcacacatttgactgcagagagaggaaaggggaagtgaccacaaaactgtttttcaaagcagaacttttcttcacattgaggtctaagggacattgttcaggtgagcccttctaaagatatccagcgtgtgggacaatatacgaatgagtctcaaaaggccactgtcaccgctattagaaaattatattagtgcatacaaatatatttgagacttaaggctgagggtttgtgcatcagctgtccatatcagaagaaacccacacttacaagttaaagtatacatgctgtaattttatgaattgtagctttaaacaatagtatgtcgttggtataggcagtctatgtgatgtgtgtatatatattcaagtgggtgaaaaactacactggctttaagcaccacagtagcatctctataactgtatgagttgggagttctgcaggatgtcaattttggagaaatactctaaacactaggtctaattttagtactgaaaggggaaatttgttgtttgttagtttctaaaagcaaaaatagcacatcaaaagtagcagaagaggaactgtaaaatttcacagggatggtatgaggatgaaaagttatttggttatgaaaaagttgtaggccaggcgcagtggctcacgcctgtaatcccagcactttgggaggccaaggcaggtggatcacgaggtcaggagttcgagaccagcctggccaacatggcaaaatactgtctctactaaaaatacaaaaattagctgggcgtggtggcgcatgcctctaatcctagctactcaggaggctgaggcaggagaatcgcttgaacccagcaggcagaggttgcagtgagccgagatcttgccactgaactccagcctgggcaacagagtgagacttcgtctcaaaaaaaaaaaaaaaaagttgtaaggaaactttatgattttccattacaatgttcttctgtatatttgacagtggaacgtgttagtactctgtaaatagttcaatactgagtatttcggactcccgagagtgatacctaaggggattaaaagtgaattggtaaaataacttatgtagctactccaccttcaaggagatgcagcataaatccccactctttaagtgtgggtgcacaaagtgacttccttccgaagagtatagtatgaaagcaggggaataagttgacagtggagaaacctgacaaacagtacctcagccagcagaccaaggttaacatcaagtgataaggcatgttgatagtatgtccccttgatatgatgtgatgagaatgtcattttatctctgtaatcttcctcctaagaatccataattctagtctaatatggagaaagacaccaaattccagtagagaggcattctacaaaatacctcaccaattaaagccaggtcaagaccttcaaacacaagaaaagtctgacacagccaaggggaatctaaggagatacgatgactataggtaatgtgggatcccgcatgagatcctggagcaaaaaaacaaacgaggtagggaggacattgagtaaaaaactaaggaaatctgaataaagtttggacttcagttaatagtaatatatcaatatccgttcattaattgtaagaaatgtaccataccaatgtaagatgtcaataatagggaaaatcgggagggagtatgtaaaaactctctgtactgtttttgcaaattttctgcaaatctaaaactcttctaaaataaaaagtttatataaaaagagtggatgggtacttttgacaactattactcatttggttaagtctcctctcataggatttagtttatcacacaggatttacaactatcaattacttacagtaaccaaaaagtcaataaaacacactgtggatatataatgtactttgactaaaactggaatgaagaacttgtagggaatcaaagataatgcctaaatctgtcttcattatcatcaccttaagaagagaacagttgagaccagaccatgtatccagacatggtaactgaaaatgggtggatctgactcactgagtcacatttcatggcttatgctatataggtaaaattaacagtgactaaaaatgaaattactgacaaagtttgctcctggaccatatgagagagtccaagtactgactcggctcaaaggaaataaaaccgaaaactcttgatctcacccaaaataaccattctgcaccctgtctgaaccttgggctctctctactaaccagcctactcaaaaccactactgagagtggtgtcccgctgctaagaaacagacaacacacagggcctttcgggccaccaaactagtagccaagaaggaaccatcaaagacgcgggcatgatcccctttggagctccccgatcttgactagtcatccatccctacagaaaaggccaatcgggctccatccctacagaaaaggccaatgggccttacaattgggcccatttttaaagcaaggtcacttcatcaacctagatacgtttgcactgggggaggtctctcacatcgcctcatacttgaagtgaaaatgaagattcaacgttcctctagagtgggaaggcccggaagcgccttcttggctcagtagtggctcttctgggtcttggtcttgctggtaaagaatgcaattaggtaaaaatcgcgtgtcagtttgaaagagattcgacacccagtttcagcgttcatgagaagagaggcgtaggaaatccccacgcgggcctttctgcttcacgtgaggaggaaattgtcacaagtctctgccttcctcaggtccccttcctaggggattcctcatcgcatcccctagccgccctaccccaccacggtccttgggacctcgcggtgttctctccttgatcccttcggcccctagactggggaatccccggaacgcgacaccgtggcttcttttcctttattctcttcctgccttccgctccgctcagagagcaaggggccaggagcgcgggaaaatggcgccggacgcgaggcgcgaaaagttcgcatgcctgctgccgcgtgggcgccagaggatctggcgatcgcctgcagcgccgtcgccccgcccccgcgcgcgagaatcgaagcacgcacgcgttctcctgcgcgtccgctcccgccgttgcgacggacgggtaggggaggcgaccccggcgttctgctccgcactgtggaggaggtggggaggtgttgggccagggctgaggtaggagggagtctgtccctcgacgcctcctgcgacgccagcccctgagcgatgatgcgaacgtgcgtcctactctccgcggtgctctggtgcctcacaggaggtggggctccctccacccggtccccaggcctctccctctgcccgagcttcccggtcctgcctccttcgcctcgccctgccctgcccgactctgaaccctgctcctcttctaactaaaagtcagtgttttatttcctccgcagtccaatgcccgcgttttaccttattcaataagaagggcttcatttatggcaagacaggacagccaggtaataagggcctctgcacacgcgggcccattggaggggccggaactgcgaagctcttcccggaagagcttcctggagagaaggggaacgagccagcgtttattgagcatctattatactaagcatctgcttggcagttcacgacggtcgcattttttcatccttacagcgatccctattgtgtcgccttgctttaaagccttacagctcacaaagggctgggatttattccagatctctctctcagatgccatctcacttccaggtgtctctgctgctttgcaacgcgggaaacccacgcaaaggagtgatttccaaggccttctgtttggaatatctttaatcctccccttattaactggaaaaactcccacgcatccttcagggctcagctcaaatgtcctttatctctgcagtgaaactttcccaaggaaaattagttacacagctaattttagataaattgagccagttgatagaatttgtcatgtttagactccttctgtgtttgagttctctccccgacccccaaccaaattgtaggacgttgtctttatgagcctggcattcagtaggctttaaaattaatatctttctgggttgcagtgattccaagcataccatcgttctgtccaccaaaccagaaacaagaagtaatcacacatcttcctaatatgcccagataggcttaattattgttcccaatggagaaaatttacagttaaacatcaggtttcccttagggtgatcatgatcatctatctttctttctttctttccttccttccttctttttttttttttttttttttgacagtctcactctgtcacccaggctggagtgcaatggcacaatcttggctcactggaacctccgcctcctgggttcaagagattctcctgcctcagcctccctagtggctgggattacaggcgtgcgccaccacgcctggctaatttctgtatttttagtagagacagggtttcaccatgttggccaggctggtctcgaacttctgacctcaggtgatccgcacgtcttagcctcccaaagtgctgggattacaggcatgagccacagcaccagccaatcttttttttttttttttttttttaaagacagcatctcgctccattgcccaggctggagtgcagtggtgtgatctcgggtcgctgcaacctccgcctcctggattcaagcaattcttctgcctcagcctcccaagtggctgggattacaggggcccaccaccatgcctggcaaatttttttgtatttttagtagagatggggtttcaccacgttggtcaggctggtattgaactcctgagctaggtgacccacccaccttggcctcccaaagtgctgggattacaggcatgagccaccgctcccagctgatcatctttagaatagttatgctgaagtctttttctgaactttctttgagagggagtcttgctctgttgcccaggtgggagtgcagtggtgcactctcggctcactgcagcctctgcctcccgggttcaagcaagtctcctccctcagcctcccgggtagctgggattataggcccacattaccacgccaagctaagttttgtatttttagtagagagggggttttgccgttttcttcaggctggtctcaaactcctggactcaagcgatccgctccctcggccttccaaaatgctgggattacaggcgtgagccaccgtgcccaggccttttctgaacttttaattgcttccaccaaccctccaaaaaattatgatttgagtgagttctgaatctgtacattaaaatgaactttaaatatatcatgtgtatttttataaacaaaagtgtaatatggaaaaatatcatgactcgtgactaacagtgtagagttttaaaaaacttactatgagaagcaaaaaggacttcagacgagcgttctaaatgttatatattgatttttaaaatagtgaaatccaacaagaactaattcgtgtcttcagcacaaaatggtaggagtatatttcttaatttaattttgctatataatgtagttatacattattttatttcatcacagacaaaatatatgtagagttacatcaaaatagtccagtccttatctgtatggattttaagctttctaaaaaagaaatagtggaccccacctacttatggattgggcctaatgaaaagacgttaacaggtaaatttgattttaatatgtacttttttaatgatgtgaacatatttttagaaaatcactgttacttattggaaagaacaaattgaaatttaattttaatggcagtttctcttgctccctacttagaaaaatcatgttatattttggccacttccttattttctccttatgcaaaaactgaagcagtaatttttgtgccctgcttctcagagctgtattaattcaaaggtctttataaaacctaaaatttatcattgtagtaccagtaataggagatgaaataactaatatataatttttcatcatgttagagtgccttggaacataagtattattaattagtttcttgtctgaagaaattgtatagtagtacagagcagtgcaatctctttttctgaattactgggatgaaccaattgaaactagatgccaagaaacaaagaaaaccaaaatatatttcaaaagtgtacttatctcatgtagtcttccacagagtaatatgacagaattaagattttgtgggatccttaaagttgagatagttcattaatttttaaaatttttgtatctatttgtaactccaagtgtactaaataatgcttgatatgttatatgttaaataagtaatttactattctgtttaggaaataatagaataaatataactgaaactggacagctgatggtgaaagattttttggagcctttgtctggactttacacatgtactctttcttataagactgttaaagcagaaactcaagaagaaaaaacagtcaaaaagagatatgactttatggtctttggtaagaatttaggcacattttaacttatacatttagtttggatcgtaattaagtgtatggtttcttcatttaatgaaaatgagtctgtaataggtgactgtcaccaattatgacttacaaaatattttgggatgtatttgactaagcaaactcttaagttgacatcaagatagtttatcctaaataatcttctttcagctccctacttgcctctatctagatatgtaagcgcatctactttatcacaatttagcaggtaatttaaaaactgatctttaattctataaaagcaagttaatgatcctttcactgggttgtgctgacagcaatgacaatttctgtgaattaaggccctccccaaaaagtctttctttttcttgatactgttatctgtatagccaacccacagaagccatttctcttgttgtaccaagtagataatgtatcagatgaaaataacatttttcattaaagttaatagttttatgtatttttgtgaggactaactgataaaacgttatgtttctatgctgactgcaagattgatgggatttagtattacatagtatttgaaaattgtttggtagaggaaattaatgctaggtacgattgttttcactctcatctttcttttttttttaaagcctatcgggaacctgattattcatatcagatggctgtacgttttaccacaaggtcttgtatagggagatacaatgatgtattctttagagtgctgaagaaaatcttggatagtctaatttctgatttgtcatgccatgtcatagagccatcatataaatgccattctgttgaaattccagaacatggcctcatacatgagctatttatagcatttcaaggtaaaatttttaaaatttctttaattttgaatttagtcctgaaccataatagattacaaaattaccatattaatataagatattttaaaagtaataggtcttacatgtttgttaagcactaaagtatgtagttgaccttagcctgtttatggttttaaaacttaacacactaattaattactttcaaatatgacatattgttgcttcttaaaaatcaatattttattaatacagcctttatgcagctaatatttcacttataacttcttacagaattttaaattgtatttttgaaaacttagtaaaagtgaataatcaaaccaaatttatttctattcattttaaagccttgtagttacttacattagcccccagatgcagtgaaaccatcaagtataaattattcaaattgtgcaccttgttttattactaggattagatagctggactaaacatgtgcctgcatgcacatggaattcagcacttggacctttattgaaatgtttggaacttttcagaatccctttgtgagtctatcattttttttctcttcagttaatccttttgcgccggggtggaaaggtgcttgcaatggatctgttgactgtgaagataccactaatcataatatcctccaggtgagaatttcatggtaaggaagaagtatttgtctttttctttttttagagacagggtgtcacccaggctggagtgcagtggtgcgaccatagctcactgcagcctcaaactcctgggctcaagtgatcttcctccctcagccaaggaggaagtatttgaaaatcaataaagctatttaaaacatttttgtaaatacttcgttatattgaaacgtttctttaaaaacctatttctccatcttgtgaatatttatcaataataaaatcatttctaaggaggaaaaattattttttaaaaaacgaatataaagtattaataatattgattttttaagtattattgatttttggtttcagttttttaaactgagattatgagattcttagttatttcaagatgtgatttttttttctttctcaaaagagagctggagtatcaagatgtgttattttggagtagcacatctgtaatattagatagttcccaaggttagtattatgtattttatctatgacagaaggatagatccctggtctttgttccccaaatgatgattaaatagtggcttaaagaacaacttcacaaacatgtcaccctacgttaagccaatggtgcttccaaaattatatctatattggtcatactagttgctctcccctctaccatcctcagaggcaaaggacatagtcttaaaaatcccttcactctctggtctagttcctgagctcatgtccttaattgttattgtgcatggcttatgagaagcacttagttaaaattagttattattaaattctgtgctcaaaaacccaaaatttacatcatcggtttataatgctgattaaagaaaagtctttttttttttttttttttttgagacggagtcttgctctgttgcccaggctggagtgcagtggtggccatctcagctcactgcaacctccacctcccaggttcaagcaattctcctgcctcagcctcccaagtaactgggactaaaggtgcacaccaccacacccacacccggctaattttttgtgtttttatcagagacggggtttcaccatgttggctaggttggtctcaaactcctgacctcaagtcatctgcacatatctgcctcccaaagtgctgggatcacaggtgtgagccaccacgcccagccaagaaaagtcttgctttccattttgcttggctctttttctttgatgatcatggaaattagatataatgaacgcccaattatctacatatgggatagacattgcaaataattcaaaacaagttttttaatcttattttttcttttcattttattttgttttgtttttgagatggagtctcattctgtcacccaggctgctgtgcaatctcagctcactgcaacctctgcctctggattcaagtgattcttgtgcctcagcttcccgagtagctgggattacaggtgcctgccactacccctggctaagttttgtattttttattagagacgaggtttcaccatgttggccaggctagtctcgaactcgtggcctcaagtgatccgcccacctctgcctcccaaagtgctgggatcacaggcgtgagccaccacgcccagcctaatcttaattttaatttttatttatttattttttctgagacggggtctcgctctgtcgccaggctggagtgcagtggcacgatctcggctcactgcaacctccgcctccgaggttcaagcaattctcctgcctcagcctcctgagtagctgagactacaggcacatgccaccacacctagctaatttttgtatttttaatagagatggagttttaccatgttggccaggatggtctcgaactcttgacctcgcgatctgcccgccttggcctcccaaagtgctgggtttacaggcatgagccaccgctcccagccaatttttcttaaccattgcacatattaattgacaacagttgataaggtcaaagctaactaattttggtgttaacacacaccttttcaggaatttatctacgttaagtatggcatgcttacagtacattattgcctgtgatactggaggataaatttggttcatggtttagtaattgtacctttctctggtatttttcaaccttaggcaagagatcgaatagaagacttttttcggagccaagcatatattttctaccataactttaataaaactctaccagcaatgcattttgtggaccacagtttgcaagtagtacgtctggatagctgtcgaccaggctttggaaaaaatgaacgtctacacagtaattgcgctagctgttgtggtaactataaaatataaatatctaaacatttaggttatagagtcagaagaatatataagtaattcacttggcataactgaatagaatctttacagtgattctcttaccaaaaaatatatatatatttagctaaaaggaagtaaaaattcaaagccccaattttttttttttttgttttttttgagatagagtctcactctttcacccatgctggagtgcagtggcgtcatctgagctcaccacaaccttcgtctccagggttcaagtgattcttctgcctcagcctccccagtagctaccacagctggctaatttttgtaaaaagtagagacagagtttcaccatgttggccaggctggtctcgactgaactcctgacctcaaaggatccgtctgccttggcttccgaaagtgctgggattataggtgtgggctaccatgcttggcccctttttttttttttttttttttttttttttttgagatggagtctggctctgttacccaggctgcagtgcagtgtgcagtgtggcgcagtctcagcttatggcaactctgcctcccaagctcaaaccatccttcaacctcagcctcctgagtagccaggattacaggtgtgcaatctgtaatttttgtatttttactgactaatttttgtatttttagtagagacagagtttcgccctgttgcccagactggtcttggaattcctgggctcaagcaatctgcccgccttggcctcccaaagtgctgggattacaggcatgagccactgcgcccagccaaagcccaaatttctaaatatagttattttaatgtatattaactcttcctgatgtactctcttgtattataaacatttctataatgttctgtcttaagctactgtacaatgaaggaaaacagaatggtcctacctggaaagcagagaactaggaaataggaactagaaaactagaaataggaactcataaatggggcactgcagaagatactgtaaaatgctgatagtaaaagaaaaaataggattctcactttctcctatctttaagatcatcaaattataaagtttgaaactcacataatcttccacaacttaaatgggctgaacattacctggtataatataggtactgaaatggtatgatattaaaggcagatttatattgttggtatagaatacctccaagtagtagaggcataaaatatctctaaattataattactccctgtgttttcctctgcagtggtttgtagtcctgcgacttttagtcctgatgttaatgtaacttgtcagacctgcgtttccgtccttacctatggagctaaatcttgcccacaaacttcaaacaaaaatcagcaatatgaagattagaggtgaaagcattgttacttacttgtggaagtcggggacataagatgattttcacatcccagagcatcatagatagttccattaagtaaaatcagtaagaccaaaccactggaaaacatgcattttggaaactttaaaataaatggttaacatggcatttctaagaaggcatttaatccagtatctctagtgtacaaaggaaacttgaagttttaatggattatttttaatgaaatgttttattgtttacaaacggtatgttgctgtgtacctaagagtatagtaaggtcaagaagagtatcaaagtataataaaataaaaattgtatactctccatatatttatttgtttggaatcactcttgtgtgatataaaggcgtgtatattatctttgtattagaaccaaaaaagttatttattttggtccctatgattttattttttaagataaattaatatactgtattttttaaagtataggtttaggtttacagaataatagagcagataatatatagagttccatacacccactgcaccccataccctcattcctccttacacaatttctcctattattaagatggtgcattagtgtggcacatttgttacaaatgatgaaccaatattaatttattattaattatagcccatagttcacattaagattcattgtgttgtaaggttatgtgggttttgacaaattcataatggcatgtgtgcaccattgcagtctcatacagaatagtttcaccaccctcaaaatcctgtgcttcacttatttatccctcccgccgtgccctggcaaccactgatctttttactgtctctacagttttgccttttccaaaatgtcatgtagttggttggagttatgcagtatgtagactttttagactggcttctttcacttagcaatatgcatttaaggttcctccatgtctttttgtgacttgatagctcattttttattgctgaataatgttcattgtatggatatagcatagtatgtttatccattcgcccattaaaggaaatcttgattgcttccagttttcagtgattaaaaataaagccgctataaacatttgtgtgcaggtttttgtatgaacataagttttcaacccaattgtgtaaataacctaggaatatgactgccggagtgtgactatgtgtagttttatgagaaactgccatactgtctcccaaagtggcttaccgttttgcattcaccagaaatgaaaaagtattcctgttatccttatctttcccagcatttggtattgttagtttttttttattttgaccattctaataggtgtatggtggtattttattgttttaatttgcaattccctaatggcatctgatgttgaacatcttttcatatggttatttgccatctgtgtatctttttggtgaggtgtctgttcatatcctttgcccattatttaattgggttcttaattctcttattgttgaattctaagagttctttgcatatatatatatatagttgttgttgttgttgttcttgttgttgttgttgttgtttttgaaacagagtcttgctccatcgcccaggctggacttcgtatattttggatacaaatttttttttagttaatcttccgatttattttcttagtaattttaaaagacattaagttcattaacacaataaattaaagactatattaatagattgcaacatatatgcgtgtaatatatatgataataaaattacaaaagacaagaaagaaagtgaagcaatgttgaaggcaaggttctgtattttcctagaactaagttttacgtattattctgaagtagactgtgataggataatacgcatattgcaatcactggcactaccacttagaaaacaactgaaataatacaactcaaaaacagaaaaactgaaaatctacactggaaaacattatttaacaaaaaagccagttaaagataaaataaagaacaacaacaacaacaaaaagacagaagaaatacagaaaacaattagcaaaatggtaaatttaagtacaaccatgtcaacaattgtattaaatgttatagttctaatgcaatcaaaaggcagaaattgtcagacagactgagtaaaaagaaaaattcaaccatcactacctgcaaaagaaatgcatcagattcaaagacactaatagtcccaaagtaaaaataaaaaatatagacactatataagcagtaaccataatataggtcaaatgaatatatctatatcaggcaaaatagatgttaaagcaagtactactcagcatgaaaggggtatttcataatgaacacaggttaaatacatcaagaagaaataatgtatctgcacctaacagagcttcaaaatattcaagtcaaaatgtaaagaattaaaaaaaggaaaatagataacttgataacaataattgaatatttcaataatgtactctcaataattgatagaacagctggtacaaaaaccaaaaggatgtagaagacatagacaacattatcaaccagcttgagctgactgacatctgacaaggtgacatctttttttttctttttttccaaatttttaattaaatacaagtttgcaaagattttttcacattctttgtgaaaatttgcgaaaaaaattctttcgctttattccttcagcttttcattccttcaacaatgcctttcacagagaagaagtttttaattttaataaaatccaacttgataatttttctttcatggcatgcctttgttgtcatatctgaaaactcattgccaaacctaaggtaactagatattcctgttatcttctagaagttatatagttttatgttttatatgtaagtctaagatccatttggagttaatttttatgaaaagtataaattgtatgtctagattcatttttttgcatattgatatccaattgttccagcaccatttgttgaacagactgttctttctccattgaataacatttgctcctttgctcctttgtcaaagattagttgactacatttgtaagggtctatgtgtgggctctttattctgctccattatcattttgtctattattttgtcaataccacactgtcttgattactgtatagtaagtctcacatttgagtagcgtcagtcctctgactttgctctttagtttggtgttattctgagtcttttgctgctccatgtaaaccttagaatcattttgttgataaccacaaaataacttgcttggagcttgtttaggattacagtgaatctatacgtcaagttggggagaattaacatgataacaatactaggtcttcccatctatgaatggaatatctctccatttgtttagatattctttgatttattggagttttgtggttttcctcatatacatcctgtacatttattattatatttatgccttaatatttaattttttcatgctaatataaatgatactgtgcttttaatttcaaagtccaaatgttcattgctgttatatagaaaggcaatagacttttgtatattaaccttatatcctgtgactttactataattacttagttccaggaattttttgcctattctttgggattttctacattgacaatcatatcatctgtgaacaaagacagttttatttcttcttttccaatctgtataccttttattttccttcttatcttatcgcatcagctaggactttgagtataatgtcgaataagagtggtgagaggggatatccttgcctcatgcccagtctaaaagaaagggaaaacatctagtttctcaccattaagtgtgatgttagttatagactttttgtagactttctttgttaagttaaaaaatcccctctattcctagtttgctgagaatttttatcacaaatgggtagtagattttgtcaaatgcattttctgcatttattgatatggtcatatgatttttctttagcctgttaatgttatggattacattaattaatttttaaatgttggaccagcattgcatatttggaataaatccttctcggctatgtgaataaatatttttatacattgttggatttaatttgctaatattctgttagggatttttgcatttatgttcatgagatatattagtctggagttttactttttgtaatatctttatctggttttagtattagagtaatgctggcctcataggatatgagttaggaagtattccctttgcttcagtttttatggaagagattatagagaatacgtatcatttatttcttaaatgtttggtggaattcaccagtaaagctgtctgggcctctaacaaatactagaatgtacttaaaaatcatagtgaaggggctggaatagtgtagcaggcagaataagggcctctcaaggatgtccacatcttcatccacaaaacctgtgaatatgttaaattacatgtaaaggtgaattaaataaagttacgcagaattaaggtggctaaacattaaaatagggagattatatttgattatcttggtgggtacaatgtaaacacaagggtctttatgaaacaggaagaaggaaacaaatgagaaagagaaagaggtggggatggcagaagcagagtcagagagatgttatgttgttggctttgaacacagaggaagacagccatgagccaaggagtgcaggtggcctctagaagctggaaaaggcaaggaaatggtttctgtagaacctccaaacaggaacaaagtcctgcaaacaccttgtgtttagcccagtgcgactcatattgtatttctggcctacacaattgtaagatggcaaatttttgtgattttgttttgttttgttttttagagacagggtctcactatattgcccaggctgatcttgaactcctggggaatttgtgttgttttaagccactaaaaaccaaaacaacaacaacaacaacaacaaaactatctgggcctgatgctttctgtcttggaaggttattaattattgattcaatttctggctggacatggtggtgcacacctgtaatcccagtactttgggaggccgaggctggcagatcacttgagctcagttgttggagaccagcctggccaacacggtgaaaccccgtctctactaaaaatacaaaaattagccatgcgtggtggagggcacctgtaatcccagccactcaggaggctgaggcacgagaattgcttgaacccaggaggcagaggttgcagtgagccgagatcacgccactgcactccagcctgggcaacagagcaagactctgtctcaaaaaaaataaataaaaataaaaaattaaaaaaaaaattcaatttctttaatagatctagacctattcagagtatctgtttcttcttgtatacattttggtaggttttgtcctttaagtaatttgttcatttcatctcaattatcaaattatagaattatttataatattcctttattatctttttaatgtcattaatgacattaatgtttagtagtgataatccctcttttatttctgatattagtaatttgtgtcttccccttttttttcttggttagcctggccagagttttatcaattttactgatgttttctaagaaccagcttttggtttccttgattttctctgttgattccctgctttcaatttaattgattgttgctctaattcttattagttctttttttctgcctgctttaggtttatgttgctcttcttcctgtagtttccagaaacttgtacctctaatctaaggcacatgcttagattattgattttatatttttcctattttctgatatgtgcattcaatgctatcaatttccctctaaacatttgctgaatcctacaagtttttataagttgtattttcatttttgtttagtttaaaatattttaaaatttcttttgagatttctttgacccatgtgttatttagatgcctattgtttaatctccaaatatcttttaattttccagctatctttccattattgatttttagtctaattccattgtggtcttcaggcttactgtgtatggatttttttttttttttttttttgagacggagtctcactctgtcgcccacagggagtgcagtggtgcaatctcagctcactgcaacctctgcctcccgggttcaagcgagtctcctgcctcagcctcccaagtagctaggactacaggcgcccgccatcatgcctggctaatatttttatgtatttttagtagagacagggtttcaccatactggccaggctggtcttgaactcctgaccttgcaatccgcccgcctcggcctcccaaaatgctgggattacaggcatgagccaccaggcccggcttgcttttattgttttaaatgtgatcagtactcgggaggctgaggtaggaggatcgcttaaggccaggagtttgagaccagcctgggcaacataagcatctcttaaaaattttttgctcaggtactctgttaacaatgtccagaatgttgtttatcttggtgaatgtttcatgtgagctttaggagaatatgtattctgctattggtggatggagattctgtaaatgtcaattagatccagttgattgatgatgccataattcaactatatctttaccgattttctgcctgctgcatttgtccgtcactgatagaagagtgttgatgtttccaaggataataatgggtttgtctatttctctttgcagttctgttagtttttaacccacctattttgatgctctgttgttaggcacctataaacgactgttatgtcttcctggagaattgacccctttatcattatgtaataccattcttcatccctgataattttccttgttcagaaatctactttgtccaaaattaatatagctactcgagctttcctttgatcagtgttagcatggtatacttttttttcttcctttaacctaatgataaccagttgctgataggtagctattctgaaatgaggactttctgtcaagatagtgatgttttattttcactgtgagctggctttgtttcctgcataactataacagattgctaattaacattgataaatatatctcattactttttccaatcaccatacaggttgagtatcccttattcaaaatacttggggccaagcatggtggctaacatctgtagtcccagcacttcaggaggctgaagcaggaggatcacttgaggccaggagtttgagacctgcctgagcaacatagtgagaccccgtctctacaaaaaaaaaaaaattaaatagctaggtatggtggcatgtacctgtagtctcagctactcacaggctgagctatgattatgccacttcacttcatcctcagtgacagagcaagaccctctttaaaaaaaaaagacaaaaaaccttggggccagcagtgtttcagatttcagattttggaatatttgcattatatctactggttgagcatccctaatgcaaaaatcaaaaatgcatccctaatccgaaatcaaaagtgctccaatgagtatttcctttgaacatcatgttgacacttagaaaagtttcaaatcttagattttcaaattagggatactcaaactgtatctttccaaaataaagcagttctaattccaccgcatattgggggctaaattttaccagtactgcttatgtatcctgccgtggttttctaagtgtgttatatatttacagttttgtctcttgaaatagacaattttactctggcatagagctatttattacttctaatgacatgttgatgctacttttaggcattttattttaattttattgcaataggtttaggggtacaagtggttttggtttcatggttgaattgtatagtggtgaagtctgaaattttagggcacccctcacccaagtagtgtacattgtacccaatatgtagttttttatccctcatcccccttccactttcccctcttctgagtctccaatactcatacgcattataccactctgtatgcctttgcatactcattatttagctcatacttatgagaacatatggtattttgttttgttttgttttgttttttttgtttcgagacagggtcttgctctgttacccaggccagagtgcagtggtacgatctcggctcactgcagccttcacctcctgggctcaagcaatcgtcttacctcagcctcctgagtagctgagaccacaggcatgcaccatcacacccagctaattttttttttctttggtagagccaggttttgccatgttgcccaggctggtctcgaacttctgagctctagtgatccacctacattgggctcccagatttctgggattacaggtgtgagccaccacactcagccagtatttgggtttttttttttttttttggttttggttttttaagacagagtctcacttgcccaggctggagtgcagtagtgcaatatcggctcactgcaacctctgcctctctggttcaagtgattctcgtgcctcagcctcccaagtagctgggattacaggcatgcgccaccatgcccagttaatttttgtagttttagtagagacagtgttctgccatgttggccaggctggtctcaaactcctgacctcaagtgatctgcctgccttcgcctcccaaagtgctgggattacaaccatgatccactgtgtccagcctggttttttacttctgagttacttcacttagaatagtgacctccaattccatccaagttactgcaaaatacattattttgttctttcctatagctgagtagtattctatggtgtatacatgccacattttatttatctacttgtcagttgaggggcacttaggttggttccatatctttgcaactgtgaattgtgctgcaataaacatatgcatgctggctggatgcagtggctcaccctgtaatcccagcactttgggagaccaaggctggtggattgcttgagctcaggagttcaagaccagcctgggcaatgtggcaaacccccgtctctaccaaaaatacaaaaaattatccaggcttggtggcttacacctgtagtcccagctccttctagggggctgaggtgggaggatcacttgagtctgggaggcagaggctgaagtgagccatgatcatgccactgcactccagtctggatgacagagtgagaccccatctccaaacaaacaaacaaacaacatatgcgtgcaggtgtctttttcatataatgacttcttttcctttgggtagatacccagtagtgggattgctggattgaatggttggtctacttttagttctttgagaaatctgctattgttttccatagaggttgtactaatttacattcccaccagcggtgtataagtgttcccttttcaacacatccacactgacatctattgtcttttgactttctaataatgaccattctggctggggtaaggtgttatctcattgtggttttaatttgcatttccctgatgattagtgacgttgagcattttttcatatgtttgtggctcttcaaagggtcacacgagtctggacacaatggctcatgcctgtaatcagagcactttgggaggccaaggcgggcagatcacctgagatcaggagtttgagactagcctggccaacgtggtgaaaccctgtctctactaaaaatacaaaaactagctgggcttggtggcgcacacctgtaatcccagctacttgggaggctgaggcaagagagtcacttgaactcggcaggtggaggttgcagtgagccaagattgtgccactgcactccagcctggtcaacagggagactctgtcacacacacaaaaaaaggatcacacgttacacaagcagatacacagtttatctgtggtattaaaatttcatgggaaggcaattgtggggggaagtcttaaaaaaaaagcttcctaaaggaggggaaaagaggctggcaacccctggcataaaagattaaacccaaaattggcatccaaagccttctacggtctggtttccattgacctttccaccttgattcctatcattctacactgggggacagattggactaaatctcttaagttctcttccagctctaagaatgtaaaggtcttttcagtttgaacccttttctgtaacaagactcatcttgctttctcctagacagactacacttattcctcatatgtagaatgcccttccatctttgtttccacgttattcacaacacttctacccacactgatcagtttcttccataaatgtattgtctgctactgctaattttagcatggaaccacatttttgttacaatttactttttttcttttttctttttctttttctttttttttttttttttgagacaggatcttgctgccttgcccaggctggagtgcagtggtgtgatcacagcccactgcagccttgacctcctgggctcaagcaatccacctgcctcagcttctggagtagctgggactataggcatgtgccactacacctggctgattaaaaaaattttttttgtagagatgaggcctcactatgttgcccagactggtcatttaacatttttaagcctctttcattatttgtaaaatgaaaggattatattaaatccataatatctcttccagcactgaatctaggtttaatgtcttttctatcttctgtatcctttccccaccatcccctactagaataaactcctgtgagcaggaacttcctcatactaacctttgaatgccccccacatttctatgcattatagctgtaataagtaattgaactgattaaattgaatctgcattcagaggtaaacttgtggttatatcctacttgctacttattttgaatcttgagaatatttgcagccaggcatggtggctcatgcttgtactcccagcacttttggaggctgaggcaggcagattgtttgaacccaggagttcagaaccagcctgggcaacatgatgaaaccctgtctctacaaaaaaattcaaaaattagctgggtgtgatagcacacacctgtagtcccagctacttgggaggctaaggtaggaggatcgcttgagcccaggaggcagaggttgcgatgagccaagccaagatcacaccactgcactccagcctgggcgacagagtgagaccctgtctcaaaaaaaaaaaaaaaaaagccagacatggtgcctcacgcttgtaatcttagcactttgggaggccaaggtgggcggatcacatgaggccaggagtttgagactagcctggccaacatggcgaagccccatctctactaaaaaaaaaaaaaaaaaaaaaaaaaaattagctagatgtggtggcacacacctgtaatcccagctacttgggaggctaagtcatgagaattgcttgaacctgggaggctgaggttgcagtgaactgacatcctcgcaccgctgcactccagcctgggtgacaaaatgaaactctgtctcaaaaaagagagagagagagagataatatttgccccttgatacattgattcacactttttccatcccctaaccccgatccatagtaaactatttaaatattataacacagtagaattaaaagcttgtgttgaattaatattttgcaaatgttaacccattaacaacaaaattaaatgaatgtaatattctttatctcattagcagagacacaaagccctaaaatggcaacaaagttattatatcttctgacttattcaatggaaacagaagttgtaacagcattcctacaatttgctgctgaaaaaaatcccaccctttcccttttttttttttttttttgagatggagtctccctctgttgcccaggctgaagtgcagtggcacaatctcggctcactgcaacctccacctcccgggttcaagcgattctcctgtctcagcctcccgagtagctgggattacaggcgcacgccgccatgcctggctaattttttgtattttagtagagttggggtttcaccgtgttgcccaggctggtctcaaactcctgagctcaggcaatccacccacgttggcctcccaaattgctgggattacaggcatgagccaccgcacctggcctccctctttttcatcttgattctgtatgtgtacatttgtagtacttagaagtcacatttcacaggattgtacctaccaaaagagtcagtattgagaattttgtattttgtacttctgcaagagtattttccaacactagtgtattattaataaactaatgaacatttggttttcatttgcttgtttcaacaaccattttggcatgtatgtggtgttaatagcttaatgctttgaactgcaggtgccatatcttcatgtattgtaaatgtttctgtctgaagcagttagaaaaactaatggatctacttagttcagatttagtaaaattttctggtcgtatgtgaaagcattagtttattgaagtataagaaaatcactgattacaaactttcaagagcacaaacatttagcctctatggacatattagctagcctatcagaggtattattggggaataaaaggctaacagtttatgtacctttctaatcaatgattaataaaatctcttgtaagagcctgtgtgttgtcaccggacatttttatcttaccttaggctttcttatcagctgcaaagcagactatcctgaaattcttaccaagatatgtgttcttaggttacctgtgtattaacctgctcagaatatccagaagagaagatgtccaaatgtaatctaggctgacctttttctgccaaattgtttcagttgcagattatggactcttgcctttcattttcattatattcttacagttttttgtttacttcacatctttaaaaacaaaacattacaggttcatttaaagcctctttatacttttcttctaccactattctcttatcccccccaagaattaatcaccactctgaaattggtaggtatccctcccatgtaagttttttgttgttgttgggtgggggttgtctttgtttttgtttttgttttttctgagactgagttttgctcttgttgcccaggttggagtgcagtggtatgatttcagttcactgcagcctccgcctcccaagttcaagcgattctcctgcctcagcctcctgagtagctgggattacagggggcgcaccaccatgcccagccaatttttgtattgcccaggctggtctcgaactcctgacctcaggtgatctgccacctcggcctctcaaagtgctggggattatagacatgagccaccacgcccggccttaagttttgtaatcatttaatttttacatcaaaggtgtaatgcgtatgctttgcaactttctttacccatattttaaaaaattctgttaacacatgaagatttgattccattcctcctctattccactacattaatatggcaatatgtattattttccatctattaactgtatgtgcatcagtcagggtccaatctcgagacagaaaatacacagtaatttgattagaggaagtttaatatgaggaattattaaatgtaacaagggattggaataataaggaattgcctagtaagatgtaaggagaactctaaagaatagaggaataacagatatacatatatttttaaggcaataccactaggactgagagtgtctaagaaaatccaccatcccctagggctgaggtccagcttgttaaaatgagcataaccatgggtcaccagatggaagaaaagtcattgtcgtgctaaaaatacactctctagaacttgtcagagacccaccctctgcggtgccaggaaaagctgtacatagggaagtttctcactagagacactctgctataaaaccacagaaggaggccaggcgtggtggctcatgcctgtaatcctagcactttgggaggccaaagtgggcagatcacttgaggtcaggagttcgagaccagcctggccaacatagtgaaaccctgtctctactaaaaatacaaaaattagctgggtgtggtggtgggtgcctgtaatcccagctacttgggaggctgaggcaggagaatcgcttgaacccaggagacagagatggcagtgagccagattgtgcctctgcactccagggcaacagtgacacatcatctctaaataaataaataaatccacagaaggaggaggagttgtcagtggtgctgctagccaccaggcactgcagggtatggacaatggagaagttgaacatgctaccagagcctgccaaagcaagaactcagaacctacagtgtctctccagcacccctttctgacagttcattgttgtgccagctggcaaaggaaaaatattatcagagcccagattcattttcatagagcaggcaaaaaggatgaatttggagctgagagacaataagttgctaactgtcacagtctaaccttttggctatttgacgtccacatgcacctttctatacacatttgaactcttgttcatggacaaaacaatttttattttttgagacaaggtctctgttgctcccgctaaagtgcggtggcacaatcatagcttactgcaggctttgaactcctgggctcaagcgatcctcctgcctcagcctcacaagtatctgggactacaggcacgtgccaccacacccagttaatttttaaaatttttttgtggagacaagttctctctctagaactcaggctgatctcaaactcctgggctcaagtgatcctcccgcctcagcctctgaaagtgctgggattacaggcgtgagccacctcacctggccacaattttatattctaagaagatacatctatccatcttaaaagtacttgctgtttccccaaaatgtaaagatatgtagtcccaacagtcattgtttctattgctattttaaatacttctcaaattcagtcacagttccactgaatattcttacctaaagactaaactgtaaaattatctaccaacaatctgtatattaaaaactggaaaggagagagaagaaggatagcatattaaaataaaggtattggctgggcacagtggctcacacctgtaatcccagcacttcaggaggctaaggcgggtggatcacctgaggtcaggagttagagaccagcctggccaacatggtgaaatcccgtctctactaataatacaaaaattagccaggtgtggtggcacacacctgtaatcccagctactcaggaggctgaggcagaagaatcgcttgagcccaggaggcagaggttgcagtgtgctgagattgtgccactgtgctccagcctgggcgacagagcaagactttgtctcaaaataaataaataaataaataaaggtgtgaatacaagaagcaaagagaaaatatgcaaagctactttgtttctgtgattggtcattaaggttgtagtttatacctatggcttccttctgcgggaagccaattccgtgttattcttgccctcagtcagaacttcagttgctgtgggttctttatgtggtggaatgactgaaattttattgccaaagtgtctgaatctttattgttcttaccccttctcctccccacacctgttttttggttgctacgtagttttccatcaacctttactattgaagatggaagaactagaggtacctcagagaatctgggttccagacatagtcctcctttctacccttgtgtagcaactcagtttcccattggtcatcaggatcattctctccagccagattaactctcctttctcacctcatccccttttttccctgcttagttcaacaacatatggagcccaaaatgtccaggtgacagtctcatcttccaaaccagggaagaaccattgtggtgtctccttgtggaagcatccccctcttgggaacaaagatctccaaaccatcaaagctcaaagttaccaggatagagagcgaacattcttctagtgggttattgggtggaatagtgagaggagccactcctacacccactctttgattcctggactatcctggctatgagggagacagcactagatagtggcctctgattcaaaacctaaactgcatcctgtaaagcagaacccatttctttcagggtgttgtctcccagttgacactgtaacagattttagtgagccatttcacctttccgttaagctaattgcttctaggtgatggggagtggagtaagaccagcgaattctacggccatgagcccactgcttcacttcctttgcagtgaagtgagttccctgatcagacacaatgcagtgtggaatgccatgatggtcgataaggcattctgtgagttcacaggtggcagcgctggctgaagcattatgagcagggaaggcaaacccacatccagaatatgtgtctattccagtgaggatgaatctctgttgtttggatagttttattctgtcggcataaaaaaaactgggcacacaggttaatgactaggttaccctgaaataggctaatgcattattcttttccataatagcacatctcattttgaaacagtagaacttcataaaagtgagaaagagagtatgaacattttagtggtaggattctaaagtgattatgtccccctaagaaggaaatgtttccctcttgaaggtagaactaccaccccaaccatcctaaagagacagatgcctggccggacacagtggctcacgcctgtaatcccagcactttgggaggctgaggcaggtggatcatctgaggtcaggagtttaagaccagcctggctaacatggtgaaaccctgtttctactaaaaatacaaaaaaaaattagctgggcctggtggcaggcacctgtaatcccagctactcaggaggcttaggcaagagaatcacttgaacccgggaggtggagattgcagtgagctgagatcactcattgcactcagcttgggcaacaagagcgaaactccgtctcaaaaaaaaaaaaaaaaaaaaagagagacatgcctatggagttcaaaaagaaacgctgcatgtactcccacgttataatgaacacgtgtacatatagaactacacgccaggaactgcacagagtgtttccgatgtattcagtagttctcatattcatcataggaggcagatactcttattattcacatttgatacacatcaaaacggaggcataatagggaagtaatttgcccaaaaagtcacatagctggtatgtggcagacttgacattgaatattccagtatctacgctctcttcattaccaactattctgtctttcatagtaagttttatcttaaacaccagtaattatttctaacatttcacatgagctcctcaaacaaagcagtttaatgggaagtggctgttaggcaaataagatacaaccaaatacaaaatttaaccaccccttgagggaaaacttacagtgtaggtcaaagggtaaactactgatggtgttgcattccgaaagattgccacctgctcctgtctgatgctattcttttttcttttcttttttttttttttagatggagtctcgctctgtcatccaggctggagtgcagtggcacaatcttggctcactgcaacctccgcctcccgagttcaagtgattctcctgcctcagcctcctgagtagctgggattacaggtgcctgccaccacatggctaatttttgtatttttaatagacatggagtttcaccatgttggccaggctggtctcaaactcctgaccttaggtgatctgcccaccttgggctcccaaagtgctgggattacaggcaggagccgccgcgcctggcctctgtctgatgttattctgctttgacttttcttcccctctccttagaaaatcccacagaatgtaggcactgctgttgagtttgtgaaattctctttttcctaagccaggaagctgttttctccttctatcttttgtttttcatcctccagtttccttttactctttaaattgctgctttatttgcacctgagctgtgttcccctttggcaagctttccttaccccacaacccatgcatctgataaatgtgtctcaaggtccttcctgccttcttcctccttttgtttcataagcttcttcagtccctcagaaagaagagcacagataaactgacagattagtgtgattacctttagctctgtgagtggaaagcttgacagtcaaaacaaaaacctgatctcaagaaaaaatatttgtaacgttataaatagggaaaaacgtttatatcactgccaggtttgtgcagatgtcagtggcctagagtggaaattctgggtctcactgtagcaagctgcttatttcaccagtcatccgttactcagaattgaacattaattagtcaaaaaaagaacttttatgtttctccctaagtcagagaattgtagctgccaggaggtaatatagctttagacagctatggcacaataaggagttttgcaggtctgaaggcccctgcagttgtagaaacatggttggtgtaaaagtaaagttccaggctgggcgtggtggctcatgcctataatcccagaactttgggaggctgaggtggatggaccatttgttgttaggagttcgagaccagcctggccaacaaggtgaaaccccacctctactaaaaataaaataaaataaattttaaaaataataataaataaataaaatagccaggcgtggtggcaggagcttgtaattccagctactcagaaggctgaggcaggagaatcgcttgcacccaggaacccaggaggcgaaggttgcggtgagccgagattgcgctactgcactccagcctgggtgacagagcaagactccatctcaaaaaaataaaataaaataataaaaaagaaagtacagttccagagtgatctcatgttacaaagactgcttgcaatgggctcagctatgaggtggagtttgataaacagatgctatgctatcactttggatcatcccagggtaacaacacattgatatctggtatcagaatctagaatcaaataaagagcaatgaagctgtttagaaaataaggaaacaggaagcaaaaataaaaaaaaattttaaagtagctttttttttttttttttttttttttgagatggagtctcgctttgtcaccaggctggatggagtgcagtgatgcgatctcggctcactgcaacctcctgcctcagcctcccgagtagctgggattacaggcagtagccaccacacccagctatttttttttgtatttttagtagagacggattttcaccatgttagccaggatggtctcaatctcctgacctcctgatccgcccacctcggcttcccaaactgctgggattacaggcgtgagccaccgcggccagccaaaagtagctttgtaacaccaatcattcaggttttgcatgcagtgcagacagcagaggaagcacacttcagtccaaatgagcttgaagtcctttttctgcagatgtagttcgcacagctttgactgaacagctccaatttagattcctggaccctacctcatttctgaggtttcctggagtgtggctcacttagaaggaagtcaaccaaatttcaaatggagaggaaagactaaattgaatctggagatatgtgcatgtgcctcccttttctttccttatggcccagctttgtttgagcctactatcaaatgtttttgtttcgttttgttttcttgttttgtttttgagatacagtctcgctctgtcaccaggctggagtgctgtggtgcgatctcagatcactgcaacctccaactccctagttcaagcgattctcctgcctcagcctccctaacagctgggattacaggcgcgcaccaccacacccagttaatttttgtatttgtagtagagacagggtttcaccatgttggccaggctggccttgatctcctgacctcaagatctgcctgcctcggcctcccaaagtgctgggattacaggcatgagccaccgcgcccggccccaatggtttctaaagcatctcccaaagcatgtctaccctgagtgacagaaagcaagtgaggaagacatctgcaacacacaatggaaggcgaaggcctctggctttctgattctggtcctggctccatcattttctttttattttttttctttttgagacaaggtctcactctgtcactcaggcagagtacagtggcatgatctcggctcactgcagcctctgcccccctggttcaagctattctcctgccttagcctcctgcctccaagaagctgggactacaggcgtatgccaccatgcctggctaagtcttgtatttttagtatttttagtagagatggggtttcatcattttgcccaggctggtcttgaactcctggcctgaagtaatccacctgcctgagcttcccaaagtgctgggattacagacgtgagccaccatgcctggccctggctcttatcattttctagtacagtacatctttagcaaagaccattttctcatcccttttgtcagtacagcacaatactgtactgtttcattagatgccactgtaacctagacggcagcttaggactctgtcccttggagatatgggtggtagacttgagaaaagatttcagaaagcagagggaggaggggtttacactgccacaacacacaaaaaaacttcaaatagaacagtaagcattaccattctcttgttttttcaccttttatattgtgaagtacatcatggatacagaaaagtgtatttaatataaaaccgtagcttaatgaataattaccaaataaactcctgagctacccgccacccaggtgaagaaataaaatattgttagcattcttgaaacccacccctttcagatgctcaacccctttcagatatgattctcctaatcatatcacttttccaccaaaaaggatgatttcataatagttatttccttacctttcttggaattttaccgccaaagtgtagatccctaaacaatatagttactgtttttgaatgttgtgtggagataataatattgaatatattcttttgtactttctttccaaagattaatctcctatggttttaattcatttatatcaattgctgtatagtattccattgtatgaatataccttagtttgtttatccatattcaactgttggtgaatattcaagttgtttccagtttttggctgttaatgacattctactaaagaactttcttaagagtgtatcccactgatcgacatgtgcatatgtttctctagggtctgtacctcaacgttgaatttctggaacacagggtaggcaaatctttgatttgtaatgccaaactgttattcaaagtggctgtactagtttaccttcctagcagtagtgtatgaaagttcccatttgtccaggtgctcaccaacacttgatattgtcagacttttagcttttacggtgagggaataatgttatttcatagtggttttaatttgtatttccctgattagtaatggagtcaagcatcagtttatacatttgttagccatttggtttttcctttatggaaagtgccgttcaaatattttgtctgtttttctaatgggtcatctttttgttattgatttgtattagttccttatacattctggatactagccctttgtaagttgcatgtattttaaatatcttctcccactccgtgggctttttaccctctttatcatatatcttgtgaacagaagtttttaatgttaatataattatcattttacctttcacatttagatctataacccatctggaatttaatttttatgtatactgtgtgatagggatccttttttttttttttttctgagacggagtctcaacctgttgcccaggctggagtgcaatggcgtgatctcagctcactgcaaccttcacctcccaggttcaagcgattctcctgcctcagcctcctgaatagccgggattacatgcgcctgccaccacacccagctaatttttgtatttttagtagagatggggtttcaccacgttggccaggctggtctcaaactcctgacctcaggtgatctgcccacctcggcctcccaaagtgctggaattacatgcatgagccaccacacctggctcatttttttttttttttctttttagagacagggtttcactctgtcacccagaatggagtgcagtagcagtcatagctcactgtaacctcaaacttctggctcaaattaacctcctacttcagcctcccaaaatgctggaattacaggtgtgagccaccatgcccagccaaatttcattttttatctacatgcttatccagttgtcttggcaccgtttattgaaaagtctagcctttcttaactaatcttcagtgacacttttctcatatatcaaatgtccatttttacatggggatccatttctgagatctctatttcattgtttttctgtctatccctgttcagtgccacactgaaataatatagctttcaaaatcagtcttggatctggtagaacaagtctttccaccttgttcttcttcaagagcctcatagctgtttttgccctttgcattttagaatcagctttttaaattacacacctacataaacacacacacacaaacacacacactcactcattcactcaactgttaggatttttattgggattgtactgaatccataaatcaatctgagaagaattaacatttttacaatattgtgtctcctaatccttcaatgtagtatctcttcttttgtttaagtcttttctaaggtctctcagtaagattttttttttttttgaacagagtctcgatctgtcaccaggctggagtgcaatggcgcgatctcggctcaccacaacctctgcctctcgggttcaagcgattctcctgcctcagcctcccaagtagctgagattacaggtgtgcgccaccacgcccagctaattctgtatttttagtagagatggggtttctccatgttggtcaggctggacttgaactcccagcctcaggtgatccgcccacctcagcctcccaaagtgttgggattgcaggtgtgagccaccacacctggcttcagtaagattttataacaatgtatttcagctctttcggaccttcagttcaacattttcctaaatatttcatatttttggtgccattatcattgtatttttcaaatttcattttgtacttgttagtggtatatataggattacaactggtccatatattgattttacaaaattgttaaattattaatttcataatttatctgtaaatcttctggattttcaatgtacacattagatcatctgtaagtaatgcaatattttataattcttacatattttgttgctttttcttgtttaactgcatttgctagatcttctgtacaatgtcaaatagacagtgatagtgaatatccttgtcttattactgatttcagagagaaagcttacaacattttaccataaatatgatatttactataaatattttgtatatactcttatcagattaaagaagtttcctcctgttcctagttttcttttcttttttttctttttttttttttgagacggagtctggctctgtcccccaggctggagtgcaatggcgtgatcttggttcattgcaacctacacctcccgggttcaaacgactctcccacctcagcctcccaagtagctggggttacaggaacccactaccaagcctggctaatttttgtatttttgtagagatggggtttcaccatgttggccaggctggtcttgaacccctgacgtcaagtgatgcgcccacctcggcctcccaaagtgctgggattacaggtgtaagccaccacacctggccctgttcctagttttcttggaattttaatcatgaatggacattgaattttatcagatgcatttttgtctttattgaaatgatcccatcatttttcttcttaaattgctagtgtggtaaattacattaatttttcaatgttaagccagccttgaaatcccagataaatccagtttatattattatttttctacggtgatttggtttgctgatttgtttttctgttttttcatctaagctcacgaatgagactggcctgcattttcctttctcttattgttcttgttaagttttgctagtgttgtggatgaattggaaagtgtctctgaaaaagtttgtgtgaaattagagttacttattcttaaatgcttaattgtataactgaagaaaccatctgggcttggaattttctttgtgggaatattttgtttgtttgtttttgagaaagagtctcactctgtcacccaggctggagtgcagtgtcgtgatctcggctcactgcaacctctgtctcccagattcaagcaattttcatgcctcagcctcctaagtagctgggattacaggcatgcgccatcatgcccagctaatttttgtatttttagtagacacgggcttcaccatgttgcccagattggtctcgaattcttgacctcaagtgatccacccacctcagtctcccaaagtgctaggattacaggtgtgagccaccgtgcttggccaatattttgttcttgatagagtatcctttgttcttagaggattattcatgttttctggtttttcttgttgttgttgttgttgttgttttttgagacagagtctcgctctgtcgctcagggtggagtgcagtggcacaatctctgctcactgcaagctctgcttccctggttcacaccattctcctgcctcagcctcctgagtagctgggactacaggtgcctgccaccatgcccggctaattttttgtatttttagtagagatggggtttcaccgtgtcagccaggatggactcgatctcctgacctcgtgatctgcccaccttggcctcccgaagtgctgggattacaggcgtgagccaccgcgccaggcccatgttttctatttttttctgggacaactttgggaaattgtatttttttaggataacacccatttcacctaaaatttcaaatttattggcataaagtcgtttctaatatcctcctgtcttttaaatgcctgtaacatctttagaactgttcccttttcactcttaaaactgatgatatttgctccctctctctttttatcactcttgtcaagctgggcacggtggctcacacctataatcccagcactttgggaggctgaggtgggtggattacctgaagtcaggagttcaagatcagcctggccaacatggcaaaactcttgtctttactaaaaaatacaaaaattaaacaggtgtggtggtgtgcacctgtagtcccagctactcaagaggctgaggcaagagaattgtttgaatccaggcagtgaaggttgcagtgcgccaagattgcaccactgcactccagcctgggagacagagtgagactccatctcaaaaacaaaaacaaataaataaattaaattaaatatcactcttgtcagagatctgtgagtcattttaaaggtccaatgtctgtctttattgatcctcttaatgtttttgtttcttattttgtcaatttgtgtgctttttctcctctttttcctggatttattttgctgggcttttttggaggggaagggagcggcttgttgttgggtttgttttggagttttctttgttagctttttgacatgaatacttagctttttgatttttttagctttttttcttttctaaaacaaacaaggtgaaacatatattttctctaaaaacaaaagactttagcttaattccacaagtttgatatgtatatttttattatcactaagtagaaaaaaaaatcttataacttccattaggatttctcccttgacttttgagttacttgacagtatgtgccttaggccggcatagtggctcactcctataattccaacacttcaggaggctgaggagggaggaccacttgagcctaagagttcaacaccagccctggcaacatagtgaggccctggcaacatagtgagaccccatctctacaaaaaataaaaataaaaaattagatggggcatggtggtgcgtacctgtggtcccagctactcagggggctgaaatgggaggatcacttgagcccaggaggtagaggctgcagtgagccatgattgcaccactgcactctagcctgggcaacagagcaataccacatctctcaaaaggaaaacatatgtgccttagccagccaagcacagtgactcacacctgtaatcccaacactttgggaggccaaggcagaaggatcgcttgaacccagaaattcaagaccagcctgggcaatacagggagacgccatctctacaaaaaaaattttttaaattagccaggcatgatggtgcacacctgtagtcccagctactcaagaggctgaggtgggaggatcgcttgagcctgggaagtggaggctgtagtgagctgtgattgctccactgcactccaacctgggtgacagagcatgactctgtctcaaatatatatatttgtggaagattacttcctccagagataatttgtgtttggttctgacaggcatctgggggtacattcagtccaagacccccaaaaaccaagttcacaatttcagattctctggaattctcaagaggatacaaatgcaggctaagttctgagaaaagactgggctgtggttttctcagaattttttttcctttcctttcgctaacctcttcctcactcagtaccaagagagtcttccctgcagtcccctgggggtggagtaagaacagtaagtttactgctgattcaccctaacacttacagtgtagcctttgagattagtctaatatggtagggcaggtttccttgtactagactcccaaacttggataggcccttggccttggcttctggagccatcagtccaggaggctagccaaacccaaacttagtttgcctggatttgcaaatatcaatcccccttacctgaggcaaaattactttaatgttctgatatttcacttacctctctgggtctctagaaagaaagggtaggtcacagagtaacttcacctgctaatttatatttgggaaatgtttgaatgttttataacaagcatacatttctttaacttttaattacagtttctttaaaaatatcaaatagaactaaaaagctggccaggcgcggtggctcaccgctgtaatcccagtactttgggaggccgaggggggtggatcactggagctcaggagttcgagaccagcctggccaacaagggttaaaccccatctctactaaaaatacaaaaattagctgggcatcattgtgggcacctgtaatcccaggtattctggagactgaggcaggagaatcgcttgaacccaggaggcagaggttgcagtgagccgagatcacgccattgcactccagcctaggcaacaagctgtctcaaaaataaataaataaataaataaataagtaaataaataaataaataaataaaagcctgatgataaaaacagcaatctcctgtctacccctcagtcccacacctgccagcctgcactcctttcattgctttctagcttccaaagatgtgttaaagtttcttatctgctgctgcattctttctatccttgtaggtttatacaaagtttttctattgctttactgtcatttagtgaggcttcaaaagacaaaattaacatgcacaacctgccacttttaatcagaagtccatgtatgaaatccaggctggttttggatgttaacatggagcgaatgggatacatcaaagaatggttggctgcttgttttaaagaggtcccactggtgacaggatggtagtggcgatggcagtgaggacagactggtaaagggaaaacccagaggcttgtggggagaaagggcttttgtagttaggaagagacagaggtaggcccctcagccagctccagcaggatagagacaacaacatacagcgcacagagaattcgtgcctcagggtcatagtccatgtcaggaggactgctggccagctcatcccagttctgctccatgacagatttcacctggaaggaaaccccccagattgtaacagctaggaacaacgatataccagaaatggcaaatatttggccacactccttgctgctgagctgataggcagacgtaataatccatcatggcactctttcctgcagagcccggagagcttcatactctctcaacatagtggcaggctctgctagtcagtctgcatgggaactcaagatcataccagctgctgtcctgggactaaccaatttgcagccctctcttgcccacagataaaaaacagagcctaaagaacccaccacaaattgttctggcaactctctgtccagggaattgtcacaaaccagctgcatggatgtgagccggcagaaaactatggaataagaaggggctgtaccctgggacttctgggtcccttgagaatatgggcattcccttccactatgaccatggccctcagcccaggctgtctcacctggtccttcaacagaggaagggtccccttctccagggcctcagccacaaactgctgctcttcagacagctctgggggcaaagaaagagtggtaaaaaggagagatatatggtgggacagggcctcagtggctgatcacacccagaacatgtatcatcaaaaggttccagagagcccctgggagtgctagatgagacttactccaaacaggcctctgctgtgactcctgcttccctcttggcctgcaggagtcacagacgaggaaccagcccctcaatgcctggcctgaggaagacatgaaggagtgccccccataaactgtgaagagcaacatgcagcccctcctcccaagatgtgactccccacaggcctctctgctcacacttcctccaccccagcctacagcgagacccttcctcacctagcagggcatccaggaagtccagaatggcttttgcacgcgcttctaccaagaccccagcagcattaaaaaggctgcttaggagaggcttgtctgggtcctccatgtgtagctccccggaaatcaggacctcagatacctagggccaggaagtgtgggagatgagcagcagtctcaccatagcagattatcctcactgtgccaactgccatcccctctggctcctatctctctctgccccaaggctttcttagggtcccttactctttgctctagatcctgccgaatatcctccttgccgaggcacttagcgagggagtttagcacatcttttctcttctcctctgtcaggtccttgaggacactctccatgtcctccaacttctccttcatgtttctggaatcctccgaacccaaagactttcctgtagaggcagcaattgagaacctgggccacccagcccaaaaggttttatttctaaggctctgttatttgtctgactgtcttctggagaccacctctttgtatcttcccttcttccagtctttccgtgttaaaattaagcatccttcttccaagatacctaccatcattgcctcccactgaccccacttccatcttccatctccccagctcacccccagtctagtcccaaccccaaattcttctccacttcctggaaaaaaacaaaaacttggttatttggcccttgccattcaaagtgcagtcctcaggccacactagaagtaattaggatttggagaaagttaaagcagtggttctcaaccttgactacatgagaatcacctgaggagttattacaaatcctgatgtccaggccacacccccacaattaagtcagagtttctggagacgggactcagtcgtcactagttttaaagtttcctggtgtgattttggggtataaccaatgagaaccactgtgtttagaggagacagatgcagcctccagactaaagttgaaacctgctaggcagtgcctcccgacttcctacccactcagctgaccccacctgagcagcagtcttgagccacatggactcagggtgggttggtgcagccaccctgaacacacttggctatcacccttacctaaacaggatgaagcaccatccttctctgcagagagaggaagagttatttcagaatcttcagatcacctccagtcccctgcagacttctcttcccagtgatggaagtttttactcttgcaatctgagccctcactgctggtgccagggagcctgcatcctcaccagcgtgtgtcaatgggaaagcactgtatttgcagacccttcccacatcctcaaaaacaggcagtcataggactgtgcctagatgattgaggaagaagccaaggcccagaaagggggcagcatacactcagtcgctccgcaaatttgggtcagacttctctatccctttccaagctctcttaggcagtacaaccctgctgggatcaaggggaaaacctagaaattccagaggaagccacataattcagaatcacagggaccttctagtctcactcctttagtttaaagtcaggaaaggctgggcatggtggctcacgcctgtaatcccagcactttgggaggctgcagtgggtggatcacctgagttcaggagtttgagagcagcctgccaacatatagtgaaaccctgtctctactaaaaatacaaaaaaaagaaaaacaaaaaaaaccaaacttaacttggcgtggtggagggcacctgtattcccagctacttgggaggctgaggcaggagaatcgcttgaacccaggaggtagaggttgcagtgagctgagatcacaccactgcactccagcctgggcgacagagcaagactctgtctcaaaaaaattaaattaaattaaattaaaataaagtcaggaaaactgtgacttgggaggctgtagagctagtgagtggcagggtgggactagaccctgagactgcctgactccagtccaggacccttttcacagccagtgctgtcctgctggaactggccaagtcatttaattgtgcttcctaggccaacaagacttcagggagggctgtaagctcaggatccagctgactgccagcacgaagttgtcctaggagcagcctggaaaccctagtccgatgtgcaatccagactcttcaacaggctaatttttcccctgcgcttgccatggttcccacctgtgggtgcgtcttaccacatcctcggacctaaccactctgtaattccatttttaaaaatagtgtctttgcccattctgaaatgacgaacgggaagcccagcagctcactcaccttctggaaaggattttgttttgcccctgaaatgaatatctaaaccagcaccaaaaagggaggaaaaaacaagttattggagagaccagttatcactctgtaagttccctttctccagtccctctcaatccctataccagcctccaatcaaaaaaaaaaaaaaaaaaagacaactgttttttgtttttgtttttgttttttgttttttgttttttgtttttgagatggagttttgctcttgttgcctaggctggagtgcaatggtgagatctcggctcactgcaacctccacttcccaggttcaagcaattctcctgcctcagcctcccaagtagctgggattacaggcgcataccaccacacccagctaatatttatatttttagtagagacagggtttcaccatgttggctaggctggtctcgaactcctgatctcaggtgatccgcccaccttggcctcccaaagtgctgggattacaggcgtgagccaccacgtccagccaaaaaagacaattattctatttggagactgggagaggagttaatgactcttatgtcatgttcaggcaaatcctgggtcagcgggtccaggtccccaggtcagagcatggagcctcagtccttcctagtgctgaacccacccttttccctggacccctccccaacctccaagctcaccagccacccaccctaggctgacagagcctggttgaatcccaccccccacctcactggtgtgtttagggccccccatcctgttctccatctgcctttgcttactcatcgtctccttgttggggaagacaagctgctttactcgatagctcaggacccgatttggggggatggtcacttccctttggccctagaaaaaggagctcacattgacggatccccaggtgtttctacatcattatcttgcctgatctcccaaacaatcctgtgaggcagtcatttgtatccccattttatagacgagaaaactgaggctctcagaggtcagcaggtgagacagtctcacagctaaaaacagtggcagagctgaaatttgaacccacgtctgatgccaaaactcatcttgttgccactgttcattcaacaaatgtttactgaggagctgctttgttctaggcaccatggctcctgtcctcctacctcctagaaaggagacagacaataaacaagcaaaaatacacctgtgtaatgatgaaccatgggaaatgtacaaagaaaatgaaggctgggtgcgtggctcacacctgtaatcccagcactttgggaggccgaggtgggtggattgcttgagcccaggagtttgagaccagcctggacaacatgcaagacctcatctctatttaaaaaagaaagaaagaaaatgcaaatgaaaagagggcaccgctagagagtaacaagggaaggactgggcaatgccacccaccctttcttggggcaaggtggccaagagcagcagggctgctcggagaggagtgaaggaagagtctaaggctggcatcgccttgacctgcggggtgtgggccaacactggcctccacagtccctgcctcccaggatcctaaccttgtgtttatagctgagatggccctgagagatctggctccaaaatttatattgccggtcgcttttcagggtttcctcctttaccgtctccagagtttctgtcaccagatacaggttttctctcgtattaattgatcggaatgaaaagggtagttccctcttcagcttcctggagagagtggagagagatgagagttaaggatctcagggccttacctcccactgactcttttccctctctgtgagccagctcctattgaagattaatcgcttctgagactggaaaaccaaggaacacagcaccccatcgcagttcactttacccacctcggggtggaggtaggggtggggtacaaagtagggtgagaggccaggtacggtggctatcgcctgtaatcccagcattttgggaggctgaggtgagtggatcaccaggcacacatctgtaatcccagctactcaggaggctgagacaggagaatcacttgaacccgggaggcggaggttgcagtgagccaagactgcaccattgcactccagcctgggcaacagagcaagactccacctcaaaacaaataaataaaaacaaagtggggcaagaattcaccagcatttatggaagattacaatgtgccagctgtgagccacgcttttccacttaaccttcacaatcctatgatggtaggcagaattacgtccactttccatgtaaagatactgaggcttagtgacaggttgtgagtggtccaaggtcacacagctagtaagtgtagagctgggattcaaaccctggtcagtgtaagtccaaagagagtgcccttcccgtgacactgagataggcatctgtgaagcccaagacaccctcttctctgacaaggggctccagctccttgcgctggtccctggagccagctgcatcatctgcccttaggctcatgaagcatcagattccattcccgctgggggaaactcatgttgagacctaaaacagtctgatggagtttctatttgcaatcaaaaggccctcaagacatgggtccctgcctccgatgactttcccctacctatccagtgccccaccccacatacagataccaataccctcacctgacaaacaagcattctataatagaaaacaccgagctctcttagaacaattctgaaggcctctccccagcaatactgtggtagggaggggtaattcaaaggaccagtaaaattttattgtaagcctttgtttttaatttattaataaaaaagggtggcatgggcatggtggctcacacctgtaatcccagcactttgggaggccaaggcaggtggatcacctgaggtcaggagttcgagaccagatctctctccaaaaaaccctggccaatagggtgaatgaaaccctgtctctaccaaaaatacaaaaattagctaggcgtggtggcgggcacctgtagtcccagctcctcgggaggttgaggcagaagaatctcttgaatccaggaggcagaggttgcagtgagccaagaatgtaccattgcactccagcctgggcaacaaaagtgaaactccatctcaaaaaaaaaaaaaggaaaaggaaaagaaaaaaggtacccgctccactcaaggagagcaaggccaggaaaactgtgggtcaccttcccctgagctactcctcaatctccaacaatcccagctgaagaaaacaacaacagaactattgctgaggggatggctagtgatgtcctcttgaattggaagcacctgcccaccagctaccagaacctctgtggcactggatcggtgccaccctgctggggtggggtggctgtactccatgcaggaaacatcctccaaggggttctttgctttcctcgtgcttcacttcagctctctttcactcagtacctactgtgtgcttggggtcaatacagagaggttagtaaagtcagtcccttgtcacaagttgcttccagtccagtgggaaagacgaacatggaagccactggcttgcccacaaggcagagggaaacaagcacaaaatactgatgtgggcagctcagtgcaggagagcagaggagagcaaaggagagtgcctcttaaaccaccaggtttggaggtggaggttgcagtgagccgagatcatgccattgcactctagcctggccgacagagcgagactccgtctcaaaaaaaaacaaaacaaaaaccaaacaaaaaaaaaacaaccaggtttgtccaagtcagaggaattaaccatcctgggggacagcagggatatgagtgaattgggggcatcagaaggcttcctggagactgctcctgggtgaatgagaaggcttctggaggcagagaagaggaaggcgtgcttgcgtaaaggggagggctgagggaatcctggaagtagagagcgagaggctgccctagagagccagtcccccacaaagctcatgaaaagcagggaaaagaaaaataaaaataaataaattttaaaaagagccggtctgccacccttgaatcccttggtgcccaagatgggcttcttcccctccttccctgctgcccaactccaacctcacctgttttcaagggtagccagatactgctgggatatccggttctccgatatcttgattttctgatggtggaagccctggaaactgcctgaaattgttatttctttgggtaatctcactatcaactctcccgttgagtctacattatccagaatttgaaactcagccttttgacctggaaagagaatgataaaggtcactctggagcagacccccaaaagatctctctccaaaacaccctccctggggcagccccatcctgggttccgtgccaccatccccctcccttctgagggagcgccacagctgtggctgtccaggaaatgctgttctcaccagaagcacagttaccttggggtcacaggatcccagatttgagcccactcctccaccttcttaccacatgaccttgggtaagtcacttaacctctttgaatctgtttcttcatctatagtaggagaatattactaatgtctacttcctatatttagggaaattagggctgggcacagtggctcacgcctgtaatcccagaactttgggaggctgtggcaggcagatcacttgaggtcaggagttcgagaccagcctggccaatatggtgaaaccccgtctctactaaaaaatacaaaaagtagccaggcctggtggtgtgtgcctgtaatcacagctacttgagaggctgaggcatgagaatcgcttgaacccaggaggcggaggttgcagtgagctgagatcacaccactgcactccagcctggaggagagtgacactctgcctctctgcctcaaaacaaaacaaaacaaaacaagaaaaagaaaaggaaaggaaaagaaaagaaatgaagaaattaaatataatgatgtagttaagcacttaaccaagtgcctggcatacattctaactgcttaataattgtaagccagtcttgtaggctgaaacaagacaaagaaaagtaaagctaaagaagtaggagccccagccaattgggaaataaaaattaagcagttctgggtgggcacggtggggtggctcacgcctgtaatcccagcactttgggaggctgaggtgggtagatcacttgaggtcaggagttggagaccaacctggccaacatggtgaaaccccatctctaccaaattagtcgggggtggtggcacatgcctgtaattccagctacttgggaggccgaggcaggagaatcgcttgaacctgggaggcagaagcaaagactgcagtgagccaagatcaagccactgcactccagcctgggcgacagcgagactccatctccaataaaagcagttctgtcgctgttgtttgtatgaaccacacaagtatgaagtgaggcaaccctggaaagtcacaaacacgcatggactcggccctgattgatcaggcactaataagggccttggttctgagtcagttgccaccccaggttcgtggaggatgtgtgggcatgccgaaggggctgcgtgcctttgtctccaacctcccagatgggaacctacaggggagggagagctcccactgctaggttttggaggcagggctggatttccaaagacaaatccattttggaactggtggaaatgtgacagaattagaaacagtgactgaaatcactatttgtgtgtacatgagacactaatgtcttagggaccatttgcttcttgagcagtgtaaaagaaaagaaaaatatcagagagaaaaagaaaaataaaaactatgtgcacaaagagtactatatgaagaagaggaaaaagagtaacttctggtagagaaacctgacaaacattacctcagccaagtgatcaaggtcaacatcaacagtgataggtcatgttgacagtacgtacccctgatgtgatgtaataggaatggtcctttacctctgtggtcttcctccccgagacccagaacccagtctaaccatgagaaaaaacatcagccaaattccaacagagggacgttctacagtatccctgaccagtactgctcaaaactgctaagattatcccaaacaggtaaagtctgagaaactgtcacagccaagaggagcctaaggagacatgacaacgaaatgtaatgtaggatcctggatgggattctggaatagaaaaaggacactaggtcaaaactaagataacatgggctgggtgcagcggctcacacctgtaatcccagcactttgggaggccaaggcgggcggatcacctgaggtcaggagttcaagaccagcctggccaacatggtgaaaccttgtctctactaaaaatacaaaaaatttgccaggtgtggtggcaggcacctataatcccagctactcgggaggctgaggcaggagaaccacttgaacctagaggtgaaggttgcagtgagccgagatcgcgccactgctctccagcctgggcaatagagcgacactccatctcaaaaaaaaaaaaaaaaaagttaatgtgaataaagtatggactttaataacaaacacaaaatcctatgcacacttttttttttgtttttttttgagacggagtcttgctttgtcgccaggctggagtgcagtggtataatcatggctcactgtgcaacctccacctcccaggttcaagcaattctcctgcctcagcctcccgagtagctgggattacaggcatgcgacaccacgcccagctaatttttgtatttttagtaaagacagggttttgccatgttggccaggctggtctcgaactcctggcctcaagtgatccgcccgcctcagcctcccaaagtgctgggattacaggcatgcgccatcatgcccagctaatttttgtatttttagtagagacagggtttcgccatgttggccaggccagacttgaactcctgacctcaagtgatccacccgcctcagtctcccaaagtgctgggattacaggcgcgagccactgtgcccagccctatgcacactttaactgcaccatcagcattatacagttacaaaataacccatttaaatagggagcagaccaagctaaaaatcaattcaaattaccaattcccatcattgtaaggattttctttttaagtttggtttcacctctgcctccgaattttgtatgcacacagatgagcttttccttaaaggaagttgactgacttagtcaatttttttttcccagacttaaactttgccctgtccctggggagtaatattattgtggcaaaacatcctagttctgggttaaagtatttttccattttcagtgaattgatcatttggcaaactgatttttttttttttttttgagagctgacttttagcaaattggctcttagcaatttacttttcagagaattgactcagtctttgaaagatgcgaatctgaaatttctccaaaagccccttgcttgcttaacgaaactctgcttgtggaaaggtccaccacctccaagtaatctgggtactgctcttggtcacttaaagcagttcctggcacactgtaatactctaaagctgctcagggctgttagagctcttttccgtctcttggcatgagacctcataaaaagaaatggactgtatcagagaggtctgagctatgagcgccttgctattgttcatattatgaaatattttttcacattatgaaatataatgaactcctcaccatattccactttgggctccaagtgagagttcaacacttaaccctggggcttctgaaacccaagtaccccaggaataactgagatcagaggcagggggttggaataattgactcttccataaattccctcaataccttagggatttctgctcatcagaaacttccccttcagtcttgatagccaaggaacatgaaaggataataagaatcaccaccgacctgggagataacttttattgggtgctccttttgtggcaggcactgtgataaatgattcacgtaatttgttctcatttgattttttttttttttttttttgagacagaggcttgctttgtctcccaggctggagtgcagtggcgtgatctcagctcacggcaacctgcacctcccgggttcaagcaattctcttgcctcagcctcctgagtagccaggactacaggcgcatgccaccacgcctggctaattttttgtattttttttttttaagcagagacggggtttcactgtgttagccaggatggtctcgatctcctgacctcgtgatccgcccacctcggcctcccaaagtgctgggattacaggagtgagccaccgcacccatccctcacttgattcttacaacagtcctctagagttgacacaggaggaaactgaaacttagagcaataaaacaacttgtccaaaggttacgcagctgataagaggcagagccaggctttgaaaccaggtgcttccagccctaaagcctgcatcctttcttaaccagtaagcaaactgccctcatttacttattcatttaaatgataaacacatgagaagagctcgctaaattaaaagcagattattttacaagggaaaaaatggaaaaggaagaccatttaggaacggtttccagtggaaataaatctccacttctcccactctcctcccaccatgcagctcttccgtgcatttcttaaattaaggtgtgtggatgtgtacaaatcccacagtttcgttgttgattggttgataacaatggggaattgagaaggagatggagtacaaacggtcaaggcctcctggctggccacctgtcatctaccttatactgaccttggagcccagaatccagttcatctaaccacttgtccccatctgtgtccagaatgtccatcagggtgaggcctgttgtgtagtgccggcatccaaagaaagttctcttctcccccaccagatggaagcagcggaatctatcagcatcaacaaggcttctaacggcaatcatatcccctccagcatccatctccttaactacaattcttgtgatttcctcaaatacgctgaacattgcgcctggaccaactcagaaacagaagccaatttcagtttttgggaggagggtattggttcaagtatttaaatcttccacatttggcagcctgaggtgtcaggcctctgaacccaagctaagccatcatattccctgtgacctgcatgtatacatccagatggcctgaagcaactgaagatccacaaaagaaatgaaaatagccttaactgatgacattccaccattgtgatttgttcctgccccaccctgatacaatatagtctccccgccgccgcccttaagaaggtactttgtaatattctcccctgcccttaagaaggtactttgtaatatttctccacccttgagaatgtactttgtaagcctatcccaaacatataagaactaatgataatgccaccaccctttgctgaccccttttttggactcagcttgcctgcacccagccttgttgctcatataaagcccgtttcgtggactctcttcacatggacgcacgtgacatgaggtcaaggaagagccaaaggttccaggacaatcagtacctggaatgatttgcctgccttacttctagaacgtgaggcagccatgactcagtaaagagggctaaacatcacagatcccagattctcctctgcccctcatggtacccatctggaggaaaaaagtagcagctattgccccaaatagagaaagtgagacccattttctacatctcccacagcagagttgcccccttgttccaaggggcccaagggatggaaaggcaggcccaccatgccccagccagactagccccaacgttgatgaacagaggaaccagggaggaatgacgggcacggttgccagacttcacattactaacctcaactggtcgtttcttcccttggctctgattcttgggctccctgccttgctgtattctgcaaggcaattggatgggtgcctccctaccaacaatttcccaatgaggtggtggtaaattggcctcagaagaaacaaaagcttcctgggatccacttccccatcctacctttggccaccttcccctatatcccttctgcccagcacaggcacttatccactcactgcttcctcctctgtctctggccccatcatggtggttgactctcagttcactaccaacctgggaattctaggtgtctggaaagacagtacccgggaaccacaggcccatctcaagtggtacccacctcctctctgacctcagctgttcaccagaaatggaagttgtgagaatccccacagatctctgcacagttcctggcctctgaatctcaggaagctaaaataatgaaactgaaagttgtccaggtgtggaacttcctggacgggtgggtagggctgggtgccccacctcccaagcctttagataagccaccttataactgagctggaggcagattaaggccagaaccccccttttttttttttttttgagacggagtcttgctctatcgccgaggctggagtgcaatggcgcaatctcggctcactgcaagctccgcctcccaagttcacgccattctcctgcctcagcctcccgagtagctgggactacaggtgcctgccaccacgcccagctaatttttttgtgtgtgttttttagtagagacggggtttcaccgtgttagccaggatggtctcaatctcctgaccttgtgacccacccacctcggcctctcaaagtgctgggattacaggtgtgagccaccatgcccggccagaaccccttcttcttcttgtacctaaggagtgggtaggagatcctggtatgtattctaggtgagtgtgggccagacaatggtgcacaccgtggcgccctgggccatgcaatccagtgtgtttggaatagagaaatggaatatgagtaggtatcaagtgccagcaggcaatggctgtgtctgtgccagggacatgaggaccataacccagcagaaccagctgcccaaatgccatgcgacggtcaacactgaagacccaggacaacagcagctaacacctggaggcaacagggtgggcctgtaaggagcactcagcctccctccccatctcgtgctcccgtgtacactctcaaggagatgctggtcttccttatctggatgccatctggcttctccacctacctccttctccagggagaggcctctgacctcacccatgtcctctctcagagataaccaccccggtgagcccagcctgtcttccagcctctgcatgcctcagttctgaaagaacatttgaagggatgacaggccaggcgtggtggttcatgcctgtaatcccaacactttcagaggccgaagcaggcagatcacttgaggccaggagttcaagaccagcctggccaacatggcgaaaccccgtctctaccaaaaaaaaaaaaaaaaaaaaaattagccagatgttttggcacacacctgtaatcccagctactcaggaggctgaggcatgagaattgcttgaacctgggaggcggaggttgcagtgagccaagatggtgccactgcactccagcctgggcaacagagcaagactcagtctcaaaaaaataaataaataaataaataaatagacgacagtggtggtagtaacaattacaattataataatatggctaccatatattgagtatttactatatgccaggcactgtgctaatgctcacaacagccctaagaggcattatctttacacaacagtggaataaactgaagctcagagaagttgacacagcaacatggctaataagtggcaaagctgggatttgaacccagatcgttgttgatgttctccagcacctcaccctgactatactcttgcaggctggtgaaagcaaccagggcacccctactcccaggagtgaaagcagtggctatatttctctttccaatactgtgtgggctctactcggacaggggtggtggctggacttgggcaaatatcccacactccctgacactcactccaagggtgctgtgatggtggaccggggctagagaccccaggctgctggggacagctcctcccttctacctgggactttgtgcctctcctgggaatagcagctgatactccccagaacacgctggaaggtcagtgccctcgtgagataaggattccttgctataggactcctctctctcctagccatgttggcctcagaaagtccccagaacctcttcccctgccactcaggcttatggtgggaggaggaagtatgaaaagtcccctccactgaaaggccagaaggaaacgcagcgctcccaagggagaggtgactggggaaaggccttggggagagaagtgagaaactggagaagggctggggattcactgggaaggactgagcaccacttgggaccctggctccacgtgtaaaccattgctggagtgtccccctccttggccatggcacaggtcaccccagcctctggggccaaggcgcaagacctgtcggagaacagccaggcaaaagcacagagaattttgctctctgactaccgctgccgccgccagttccctcacagcccccttgggggatttccctgctgaagccagcagaaagcccagcagtcccagcgcccctcctgccaccgtcagagctgcactgatgccccaccagcacctcagcgggagccgctgcccacacccctgccccctcccctcagccttccaggaagcgaaggccagacacagggaaacagaaacatgttgcccttttatttgcgtttctcagaatactgtacaaagggagtaaaaatcctattcacactttgcttagaaagattttaaggtgaaagttccctatgatacacggggtgggagatgcagggtcaggagggagaaaacaggcccagtgacctctcccgttcccttggacccctggaagaggacacagggacccacaccttttcaaaattaacactgcccctagtccaactggggaggggagaaggctccagcccaggctcaggctcccggcctcactttcttctctgcaggctgagacagtgcctacaggccacgtcttgccccttcctctgtgctgcttgagcagggatcctacaggactctcaccacagaccccacatggggtggcctcacaacgccacatgtggctgccacatgagaggccctgcccagtgccagtctgtatgaggaagttaaggggtgagggcctgcagaggaccacagcacccatcgtttctgtcacagcttccccatacccccgcaggagtcagggccaagttggacctgtgcttacaatgactcacgggccttttccccacctgtctacccaacagccaacccaggagttaaacccacagcagcctccctcccctattactatcacattctgtgggtaaattaaccctccaagcctgcttccctccctgcccacatcccaaaggagattgggtctagcttctgtccctacccctccctcccttacaccagtcctctgctgctatgtggccccattcttctaagtctcgactcactagctctcctacagctccccaacctccaccaggccaggatggcagcagccctggccccctcacctctggaaccaagccatctacactctaccccatctttccccaacctgaccctccccactcccaaccaggacccacggtgggttgcagagaagctgccaaaagcctgggacttggattagacagctccctacccagaaaggcaaagacccatcccacacttgcttccatacacaaaagcacacactgcgtggcatcgaaaaaacctaggaatcacagtgaaacaatccagaagccgtaccgccctctgctccctatgcaggggttaaagtgctttggctgcctgagggcaaacaagtgagcaggggtttttcccctggcctcctgtcgcaactgcgtggtccatgttcagcccaggagcccagcccattccatgaccaactccatggagtctctattcaaaaagcaaaaggaaaagatcaaaaaattcagaaaaggtcagagcccagggggcctaccccaaccccactacaagctactccaagttggctactgggggaagcgaggggggaaattaggccagaggctcaacccccatctctggcagtgtccagaggcttcttctttctgtcttcagtgttgcagcacatgccttttaccctacccctcccctgccaccctgggcaggggaaggggctgcactctcagtacttattgattccaaaaatccggactccgtggagctggggcagcttggggataagcacgctcatcagggacacggtgttgagcacaaaatggatctggtcgtacttagtgtagaagctggtgaggaagtacctgggaggggaagggtggggagagatataaaagactgttgggaggaccccttcctccctcacttcctgggaggggaaaggcagaatcccaacagctaaggagttacagaagaggttcccagaccagcgtaagaagcaagagctctcaggctaaaggggcccctcctggcccagtaccgcccccacctcccagcttcaccccaagcctgtaggcctatctcactagcaggaaggaagctccaatggaggaaagatggggccagggaggcccaaagcctgagtccagtgtaagacccaggaatattccaacttcctctgttcatccctacaccaggagccacggcagggttaataagcatggctgggccctggggtcctccaggccttgccctgcctgctggtgtcttcctgtagcccaggcactcacagcacgatgggtgtgatggtcaagaacttccgagaggccgtgaactggaccccataatccatctgctcccagtgggttagcagcctcgccttgccctggtccggggtctcaaagggtgtccccttcaccgtgtgcaggaagatatacatgccctggaggaagaagtctttgttagaggatacaaaagggaaaggcccccctgcccagctcctccacccagtcacagacacaagtaactcccagtgatctggagcctccctctgctgggcagggggatatgggctggaggtcaggatggagcagctgggagtatggcaggagaagaacaaggggactccctgggggacgggctaggcctggcatgagaatgcacggtggaagttggccacaagataggcaccgagatgctgcccccctccaggccactcatagccccctgtgcctgttgggaggaggcaagcgatgggactaagccctgcttacccgacaaagagtgcaaggtagcaagtggtgagggagcagagaagggcaaaagtggaagacggttcgagaagctaacttgagaaaggggcatttctgtatcagcctaggcaccaggactctcgggtcctgggaactctctggagccctttgttcagctctcaggagcacatcttccaggccaacagccaccccaccctagagatgtggaaaaatctgcagatttgattcctgtcatggtacacagggcaggaacccagaagggggagcaaggcagagaggtaagggctaggcctgggctctggaggcagatgtcgtcagtacatcaccctgacacctgggccaggcccgacaggctcctcctatccctcagccctgccaaagggcagcccacagggcaggggcaggggcaggggcaggcagcagacaggctctcaccatgttgtgaatgaggttggtgagggtccagacgacagggacactcacaaacgggatgctcagcagcacgatgtggaggagaccgatggccagcacgtaggagagccagatgccacggctgttcatcacccgcgtgttggggttcacctcgctgtgcgctgtgcccacattcatcctgctgcccctctctgctgttctgcaaacaagcagcacaggtcagacaggtcacactgctttccctgccccctctcaccctcggatcccgctgggaggcaggcccttgtttccctgagaactccaggcagttccactcttttgattctgaagcatggaaagtggagaaagtccatgtggacttagctctactcatttcctgctgctgggctgggataaacaacaggctgccccatgcatcatcccattgggacagggccctggcagggcatcggaggacaggtcatcaagaggcacgcagccccagggcagagaagtcaaggcccatcccccagcctcaccccctatggcactcccatgaggaccctctgccgacaaagccccagggagagaattctcactcagcacaacccctgctggactgtgtctcactgaaggcctaatgtgggacatctgctcttaagctcttcccatcaggagggaaaggaagtgaggcctgtgggtacaggcagcagtggatgaactattttgaggtcactgcatccactcacctcctctgattttttcaattctggatctccccaaaccccaacttaggaggactgatcaggtagaaagagggaagtggggagggaggaagggaggaagaaaggagaaaacaacagactagggacaacctttgcccagacctagaaggcacccctcctgggtgacacaaaacaacccatccggatgttttctccatttggcagccactcaggccaacccttgtgatgctacccactccactgccaaaccaccagggcccttttccccacaagagaggcgaggatagagaacgtggccaacacctgtaactcccatagagagctggaatccacctcaacatatgtctcctaagggcacagactcgaacctgtggcctccctcctgcccccgttcttctctgtcctgcccatcctcacctcagtctcccctctcagcacctgtttccaggtgtatattagcaccatgccttcccctgcccagcaccaacggtaggagtcctgcagcaggaggaaccaggaggtggccgcaacccacagtgagcagagggaagtagagaaggaaggggtggaatgatctgccccttatccagagtttggctgtccccagatccctgagggccctgtgaccaggagaaagtggagacagatggcacctgtgtactggctcacctccctatctgagatagggtcctgcttgctaaagaccgtaaggtcatcaccatggtaacagccccatctttcctgggaatgcagaaaagagtcccagatggagatattctagaagtacccagaaggccacctccctcacgcccctgcagcaaccccgtcagacccagatgctatctatctctgactaggatcctagccaaacctgcacaggagactgagtcctcaggggccagttatttacttccaggataacaggagcaagtttcctcttctcagacagctccaagcttagagacctcagagaaaatgtgacccacaacacgccatcccaacaagcaaacacccgtgcgccagcctggggcgcattctgattgaagagatgctcctgggacccatcagcgcagcccactaggctggataattgagcctaacagaaattcaagtatctagaaagccagagctggctcagattgtttatcttcccagggccttggggcttcagttactctagcagcccctgggacagctgctacgcaaaagcctccacctgagaggggagggcggcatgtggctgacaagtgagggctctgaaggacttaactctgactaaggagagggaaagagcttcccaagtctgacctgaaactgccaccccatcacctctctgtaacccgcacctacaggggtgctggtatagaaagtccactaacccttcctagtatttgtccaggagtgccaaaagccttggggaatcccagatcacaggaccccatacgcctttctggctttcacagggcagccaacaaaacttgatgagcctaggaaaagcctagacctaggtcctagccaacaccctcagaagcttcttcctgaagcctaaacactaggtgccctgagagcaggaaaccaccagagacccctgaaaaagaagagatcaataaactaacaaaaagactggcaatgaggaaacactcttgagactttcgtgtgactatggatacatatcacttccattagtaaaacaaccaactggcccctaccctagatggggagaaacagagagaagaggctggcagaggtcgactaggtctacaggagttgagccgaaaacttctgctgccatagctggcaggtggctgcttagtgctgggccctgatgtggtttcataacctgcctcaaaccagagcctgcagcaactctgttgtgttaaccacttttttgctggtagctctttccccctccttcccgccccaccctcttggctccacatacaaatatccgggcccagccagtatgccagacactcaagccaaggctgagcaccaccagggcagccaccaggtgagcccttcccattccctcccccaggaaagagcagccctcacaacagcaaacctcctgtcttctggaagaggagcacaaaacatccaggcctggatggggaccccaacggggagtccggggcagcacgtcacaatgccatgtccattccgcccaccccccaagctgcaggaccacagctgataacctctcaactttggcccagccaccccgactgggggagggcggtaggagcggaaagcgagtgcccaggcgaacccgcactaagcacaggagaggaggagcgaagaggcggagtcctcactgttgttggggttttctgagtgagacctcgggtgcggggccggggggaggggtcccgctctgttccccagcctgggtcttcgcactcggaacccggtccggtccgggaccccacagccatctccacgcgttcacccagccctggaggcagccaaacgtttatccccgaagccgagccgctccccgcctcccacccctagccgaggcgctcctcccgacgttccacccccggcctcccgctcgcactttattccttggccacctccccagccgatgcaccccctcggctgatgcactccctccaccccccactccctctgcccccgtctctccagcccggggcgcctccccagcagcccccaccttctctcccgcccctcccgtagccctggggcctcttggttccttccgggctcaccgtgtggggccgaagatcaacggcccgggaacggttcccgggagcgggggccgctgctgctccagcagctgtaacaacccgcggctgcagcctccccgctggcagctccggccgaatcagcgctccgcgccggtccccgtacgtcaccgccccgcgccggcacgcccgacgccttctgggagttgtagtttcttccgctggctccgggccggccctcccgacgcctcctgggagttgtagtttttcctgggctccgttcccggcctcttcggggacgcacggttggaagttgtaccgtgacgtgatggtcagatcggatgatagaattttggtgcgtaacaattccaacttttgcttctgtgcccttcaagtgtattttatccgtgccccagttttgcagatgaggagactcggacttgtaagtaactttctgtaggtctttgctgggtcctagactggatcgaaacccaaatattctgaccccaactgcaggatttttccactgcacctggctgcctccgccctggccccagattggctcctccagaaacagactagcccggccctttgccctgctgggccctcctgggagagcgcttttcacaacattggctgggatgagggtctggagggcccggaacggagcctgccttctccttctcagtcacgcttggcccaggctgccccggaccgggccacatccttggccgccccgcacctgacgtgagaagaggctacgtatcatagattcctccatcagtagtaaggagcctgagtttctgtctcaggtcagcttgtgtggctttgaatgagaggctctggtctgcagttttcacatctgcatcgtctaaaggcaagggcacagactttactgcctggtagacatggggtaggccctcctttattggcagtgtgaccctgggcaaattacttgtcttaatctccaattccacacctgtgaaaccccacctccaaggttgtgggaacccaaaagaatgtatgtaaagcacctgttgcattgtaggaatctacttaatattactgtaggaggttgaactaaatggctcttgaggtctcctcggttactcccattctccatgtcaccaagaggtcttgtctgggtagtttcaactccttacccagcttctttctaagtccactctatgcagggcagggctggaatagcaaggtcagatgatgtcatggcatgccaacctgactctgaatggcagttcatggcaccctgaactgaaagtgagggaacaggaaggaaaaggctagcccagggaaactgcggagcactttactcggactacacctacctttccttccccagggggctgccaggaaacagttgtcacacagctggagtgggacccccagaggcacttagtggtcaccaggcaggtgggtatttgaaccacccagagcagaacaggcagcttcttcaatatttccagggccaatggccccaaaagggctcattccaagatcgaaataatcatctgagtctgaaatagctctgcctatgtcctgtggaagtttctcctggtttgtggaggtgcctttccttatagtcatctttctgcagacataagcaaacccagtgttgttcttttcacagaaacctccccagcattaaggcaagaaaggtgtctctgttttttccgaagtgtgcctgcttgactcctttgatttttctctgggattcttcatcctccatcaagttgatcgatccctctggatcttggtcagtttcctgacatctctatgaagttcagtgacccagactgagtccacgtctcaaataaggttctgactaatgcagagtctaacagaaagattactgaacatgtcatgcactattaataactcctgttatcgaggatttttttttcacaataggaatgaacagagttctgactcactctaggtttgtggtaaattgcagatcactttctgctttatttagcgggagtccctgttgtcatctttctccttctctcttggccctcataattatcatatcttccccaaacgttcttcagctgtgaatagccctaagcactattcagagtgagtgacagctctcttatttcgtgctgggggacatacaaacccttggacaaacacttgtcactgtgtgccaagaagctgaaaaattcttcttgcctcagagccataattacacttttggtagcatattctaaggaagtcatcccatgtacaggaaaagctgcaatgtgtcaggatgttcattccagcaatatttatagtagtgaaaaactgaaagcaaccaaatgcccaagaaaaaaattacagtatatccactggatggaatagtatgaagccatttaggacagattgtgaaaaccctgtggcagtatggggaatgtttgctaagttatatgaaaagatgaggacacaaaatagcataacatacattccccagggatatagtcagcaaagtctagaatgaagaaaattaggacaaacacccaattcccttaacaaataaaactggggccaggtatggtgactcacgcctgtaatcccagcactttgagaggccaaggcttgtgtccaggagttcgagaccaacctggacaacatggtaaaaccccgtggtctacaaaaaatacaaaaattagttgggcatggtggtgtgtctatagtcccagctactcaggaggctgaggtgggaggatcaattgagcccgggaggtcaaggctgcagtgagctgtgatcgtgccagtgcattccagtctgggcagcagagtgagatcctgtctcaaaaaaaaaaaaaaaaaaaaaggaaaaaaaagagggggagagacttacagattaaaataaattaaatgatatatcaactaaaagtcttatttggatcctgattcaagcaaactgactttaaaaaaaaaaaaaaaaaaaaaaaaaaaaaggccgggcatggtcacgcatgcctgtaaccccagtactttgggaggccaaggtaggcggatcacctgaggtcaggagtttgacaccagcctggccaacgtggtgaaactccgtctctactaaaactacaaaaactagctgggtgtggtgatgggcgcctgtaatcccagctactcaggaggctgaagcaagagaattgcttgaacccaggaggcagaggttgtagtgagccaagattgcaccattggcactccagcctgggtgactgagcaaggctctgtctcaaaaaaaaaaaaaaaaaaaaaaagattttattaagttatcaggcaaatttgaatactgacaaggtattcaacgatattaaggaattctaaatgtttaggcgtgatatggaattgtggtaaggttgtttttttaatttaaaaagtcctccatggctgggcgtggtagctcatgcctgtaatcccagcactttgggaggctcaggcagacagatcacctgaggtcaggagttcgagaccagcctggccaacatggtgaaaccccgcctctactaaaaatacaaaaattagccaggcgtggtgacaggcgcctataatcccagctacttgagaggctgaggcaggagaatcgcttgaacccaggaggtggaggatgcagtgagccgagatcgtgccattgcactccagcctgggagacaagagtgaaacttcatctcaaaaaaaaaaaaagtcttccttggctgggtgcgttggatcacacctgtaatcccagcactttgggaggtgaggcaggcagatcacaaggtcaggagtttgagaccagcctggccagcatggtgaaatcccgtctctactaaaaatagaaaaaaattagccaggcatggtggcacgtgcctgtaatcccagctactcgggaggctgaggcaggagaattacttgaaactgggaggcagaggttgcagtgagccgagatcataccactgtactccaccccgggtgacagagagagacttcgtctcaaaaaaaaaaaaaaaaaaaaagtcctcctttcagacatacatacatactaaaatatctgtggatgaaatgatacagtgattgcatttgcttcgaaataatctggactgggaaccatagggaaataataagatgagccatgaggtgataattatggaagctgtgtgatgaggacatgaagttccttatattattttctatactttttttttttttttttttttgagacagagtctcactctgtcacccaggctggagcacagtggtgcagtttcggctcactgcaacctccgcctccctagttcaagagattttcctgcctcagcctcccgagtgggctgggattacaggtgcacgccaccacatccaggtaatttttgtatttttagttgagacagggtttcaccatgttggccaggctggttttgaactcctgacttcaagtgatctgcccaccttggcctcccaaagtgctgggattacaggcatgagccaccacgcctgggctattttctctacttttttaatgtttaaaactgttcataataaaaagtctaaacctgcatatacgttaatgattaagataagccaaaatagagcagcactggtaacatcctctggcaccagactgccagggttcaactcgcagctcctctagttaccagctgtgtaaccttaagcaagttactgaacctctctgtgcttcagttacctcgttgctaaaagaattggcaagtgacactggtgttcggaaaaaataaagtaaatgaagatggcgatgatcatgataataccctcctcatgttgtggatattaaatgggtcagtaaatgtgaaatgaaacactcaaaacaattcctggcacataattaagtgctcagtatgtgttgccttttattaattcattccacatttgaatgatatttgagcatctactttactaggttatggaaattcaacaaaataaaaacagaccttgggccgggcactgtggctcaagcctgtaatcccagcactttgggaagctgaggcgggaggattgcttgaggccaggagttcaagaccagcctggcaacgtaatgagaccccccccccacccaaccaccatctctataaaaaacaaaaataaattagccgggcatggtggcatgttcccgtagtcccagctactcaggaggctaaggcgggaggatcgcttgagcccaaggaattcgaggctgcagtgagttatgatctcgctaggaattcgaggctgcagtgagttatgatctcgctatttcactccagcctgggcaataaagcaagccctgtctcttaaaacaacaacaaccgggcatggtggctagcgcctgtaatcccagcactttgggaggccgaggcaggtggatcatctgaggtcaggagttcgagaccagcctggccaacatggtgaaaccccgtctctactaaaaatgcaaaaattagccaggcatggtggcgcgcccctgtaatcccagttactaggaagactgaggtgggagaattgcttgaacccgggaggcggaggctgcagagagcagagatggcgccattttactccagcctgggcaacaagagtggaactttgtctcaaaaaataaagaaaggaaggaaggaaggaagaaagacaacaacaaaaaaaccttgaatcaggatgaagggatttagggtgatctttttcattctctagtttcaaacttcacgtaatgtggtattacttttaaattttttattaaaattgtttaaaaacaaaatgagtctgccacaggctctttctgccctctgggagttccttaggctgctgaggtagacacattccccagcctcagtgtgctttcatctggtgatctgggagtggtgatcgggcctctgcttgtgagacatacaccgtcttgtgggctgagataggttgataaacaaggaacatgttcctgggatgctgctggccgtgttcagaagctgggagaagggatgtcaagaaacagtgcctcgagctgggtgcgatggctcacgcctgtaatcccagcactttgggaggccgaggcgggcagatcacgaggtcaggagatcgagaccatcctggctaacacagtgaaaccccatctccactaaaaatacaaaaattagccgggcgtggtggcgggcgcctgtaatcccagctactcaggaggctgaggcaggagaatggcgtgaacccgggaggcggagcttgcagtgagccgagatggcgccacagcactccagcctgggcgacagagcaagactccgtctcaaaaaaaaagaaaagaaaaaagaaacagagccccttcccctgggggaaagaataccacctctccactcctactcctcccctcctcccccacctgcttcctgaagggagggtggtgaggtcctgtccagagcaagtgcaaggaaggaaagaactgcttatttcattgacagttgtgtttttatttttgtttgggtgggggataccccaggcatgtggtgggaagaaggagggggaggggaaggcagatgttaagcagacaaaggagcagcgaatgaccctcctgagaactactgagccagtcagaagccaggagtgggtgcgggactggcagcatcgccagcgggcactctgttctgcctccctcgcccagtcctgtagttggctattttgggctgtggagagaaagggctgaactggtcagggccactgggtccccatcccccagcctgtgcctgggaacaagaacctccctggggaaccaagtgcagggaggtaccttaggaacccttcaacctgcatattctttgatatggacaattgacactctcccatgaacaaaagcagttagaaaactgaaaatatttcagatcaaaagggcaatggatataaaaacagtaagttcaagacaagaccccctagctccctaccaactgagttcctactcctagcctcacctgtctagaaatctgggtggccaccgttcccagatcaccttcttctgcctaaggccagctcctccctcagtaacaatcacagcaaacattattgtttgctatgttccaggcactgggcaaagggctttatttgtctgttacagaaccacctccccctgggctgctagacttgctccctgtctcacatttgcatttcccgaacagagtgaattctcaataaatgttaactgaactatgtaacggaactgttaccagaaaggggtcccgatccagacaccaagagagggttcttggatctcacgcaagaaagaattcagggtgagtccacagtgcaaagtaaaagcaagtttattaagtaaaggaataaaataatggctactcaacagacagagcagccccgagggctgctggttgcccatttttatggttatttcttgatgatgtgctaaacacggggtgggttattcgtgctcccctttttagaccatttaaggtaacttcctgacgttgccatgatatttgtaaactgtcatggcgcggctgaaagtgtagcagtgaggaccaccagcggtcactctcattgccattttggttttgatgggttttggccagctcctttactgcaacctggtttatcagcaaggtctttatgacctgtattttatgccgacctcctatctcatcctgtgacttagaatgccttaactgtagggttcagcctcattttacccagcttctatttaagacggagttgctctggttcacacgcctctgacagaactgcacgtcccagaccacagccacacagctctcccttgttcttgcctcagcctcgtacccttttccatctgatggactcctatacacccctcaaggcctacctcacctgtcaccttctcggtgcagccttccccagtgtccaagcagagtccactgcttcatcctccaggctgctgtgaccctggcggatccctcaacccaagccttcccttaggtgatcggagggctatatttgtgcacacaccagtcttccctcattggctgggggacatttagttctcagccaggcgcggtggctctacacaaaaatacaaaagttagctgggtgtggtggtgtgcgcctgtagtcccagctacttgggagggtgaggtgggaagacggcttgaacccaggaggttgaggctgcaagtgagctgtgatcatgccactgtggtccagcctggatgacagaacgagacctgtctcaaacaaaagaaaaaaacaactctgaatccccaatgcctaagaggccctggtacacagtacatgctcagatatgtgttaagtaaatgagacagtatctccaagcatggcagcatgaagtgtatgtatacaccccttgctcttttctacagggaacaacaatagcagaggcctttgttgccctctccgcgaaactgcccagtaacctggcattagacgggtccctggctgacctgataaagaaggtagcccttccttatctatcttctctatctatctatctacctacctatctatctatctttttcctttcagttatccccccatccaggctggacctggaggtctccaacatcagggagggaaggggatggaggcctgctgaacttctttcccctgtggtcacatattggggatatagagttaccacccttggagggaggagctgtgactcagactgccgagggtgggaggctaagaggctcactttcctgagccctgaacttgggagccagggccctgccatgcctcagtctcttccctgcctgccattctagacacgtggagcatcaggctagaagggatctcagagactgtgagggtccagaaaacagaaaggatgtgccccgtggcataaacatctgctggtcttgggcctagcccgagaattttcccaggcacttcacaggccaagacagagcgtgagactccccggtgatggcttttccagacccatgccatgtgtccctcaggtctttatcatctcacacctagacctttgccataactggttttcctgccaccaatacatccccgacacaaccaacagagtgatccagacatcaaatctaattttaaaacctttcaatccgaccagatgcggtggctcacgcttgtaatcccaacactttgggaagtcgaggagggtggatcacttgaacccaggagtttgaaaccagcctgctcaatatgaccaaacctcatctctacacaaaaatacaaaaaaaaaaaaaaaaaatatctgggcatggtggcatgcacctctggttgtaatcccttgggaggctgaggtggaaggatctcctgagcctggggaggttgaagttaccgtgagctgtgatgccaccactgcactccaggctgggagacagagtgggaccccgtctcgaaaaaaataaaaataaaaatttggcctggcacagcggctcacacctgtaatcccagcgctttgggaggctgaggttggaggatcacttgcggtcaggagttcaagactagcctggacaacatggtaaaaccccgtctctattaaaaaaataataacattaataaaaaaaattggctgggcatggtggtgcacgcctgtaatcccagctactcaggaggctgaggtaggagaattgcttgaacccaggaggcagagattgcagtgagccgagatcaagccactgcactccagcctgggtgacagagtgagactctgtctaaaaaaaataaataaataggccgggcgcagtggctcacgcctgtaatcccagcaccttgggaggccaaggcaggcagataacctgaggtcagaagttcaagcccagcttggtcaacatggtgaaaccccgtatctactgaaaatacaaaaattatccgggtgtggtgacgggtgcctgtaatcccagctactccggaggctgaggcaggagaatcgcctgaacctgggaggcagaggtttcagtgagctgagatcatgccattgcactccagcctgggcaacaagagtgaaactccgtctcaaaaaaataaataaataaaataataaaaactaaataaaacctttttaatccataagccacggaatcaagtcccaatgcatccatggcgtgcaagccacaaggatctgctccctttttacttctttacccctggcctttgccaccaccccctccatccacgcagtgatctggaagccaagccatttcatgctcccttgctcttgcacattctgcttctccacctgattaacccagccttgaaagcccagatcaaatgtcactccttggtgaagccttccttgattataccctggaaaagctagtgtacagttaaggatgctctcagcagaaatcaacagaaaacccaaataatgattcttaccctaggttgccattagaatcacctgaggagcttttgaaaattcccatcacctggccaggcacggtggctcactcctgtgatcccagcactttgggaggctgaggcaagtggatcacctgaggtcaagagttcgagactggcctggccaacatggagaaaacccgtctctactaaaaatacaaaaattagctgggcatagtggcgtgtgcctgtaatcccagcttcttgggaggctgaggcaggagaatctcttgaacccaggaggcagaggctactgtgagccgagatggtgccactgcactccagcctgggcgacagagtgagactctgtctcaacaagaaaaaaaaatctccattaccagacacatgccacatgggtgtacccaggcatcagcagttttcaaaactgcctatataccagtgtgcagccaagttgagaagcactgaagttagggggttttctttctcacgtattgagtctagaggtggcagttgctggtgttggttgagtagctcagcgatttccaggccaacatctcagtaatactcaaccctccctttatgctttgttgtctcatggccacgagatggcctgagttgaccctttcatgttcaaagtaggggccaggcacggtggctcacgcatgtaatccccagcactttttgcagggggccaaggcaggagccttaggagtttgagaccagcctaggcaacaaagtgagaccctcatctctacaaaaaaaaaaaaaaaaattggctggttgtggtggcacatgtctgtggtcccagctacatagaaggctgaggcaggaagattgcttgagtttggtagggggtcaaggctgcagtgagctgtgtttgcattccagcccgggcaacacagtgagaccctctctcaaaaaaaaaggctggtgcactggctcacacctgtaatcccagcactttcagaggccaaggaaggtggatcacctgaggtcaggcgttcaagaccagcctggccaacatggcgaaacctcatctctgctaaaaatacaaaaattacctgggtgtggtgatgcaggcctgtaatcccagctactcaggaggctgaggcaggagaatcacttgaatctgggaagtgaaggttgtagtgaagcgagatcatgcaattgcactccagcctgggtgcactcagagagagactccagactctgcactccagagagagactccatctcaaagaaaaaaaaaaaaaaaaaggtagggagaggagcagagcccagccctatcctctcttaccagcaaatcaaagactgtcccacaaacctattctgcggacttctgcttagatgtcattgaccagaattgggccaccctcagctgcaaaggagattgaagaagtaggcaacaggatttctgatgggctgagatcaatcaggttgaatcatcaaggactgagtgcattgccactcccaaagccatgtgtgttaatctggtagtaggagggaagggatgattctgccatgttattaatacttattctctctctgtgcttcacagctccctgtacaaacatcaattaatgcaggcagcacatcaaagcattgtggagacatgtctgtgcctccctccagaccatcaattctcaactcaggctgctcgttagacatacctgaggagctttcgaaagaaaccagtgcctagaccccatgcacagagattttaatgtaattggtccagatgaagccccagcataactaatctgtaaaagctccccaagtgatttgaatgtgcagggtgttttgagaaccctgccatagacccagcaccttaagaaccctgtctatgtccccttcaactagcacataaggctcacaggaaatcctcactgaatgaataaacaaataaatggatggcagagaatttctgctccaattctgcagcccctagtgggcagtgtgcactgtcctaagtgtggttcctccttccccccagatctccctccttcaccgagtttgcactcagactcccttaattaaccacatctgcagctccagctgggctcctgcttctcccacagctgctgtgctggacaccctagttccactcttttcctggaagctgccctagtcttagaaggaaataaccctccatcaacagccaggctcaattcttgtgcctcagttaaagcccctgcccagtgtgagagaggaacagggggaaagggaggattgctcagctttctgtcccacattcagctacagtcccgaaatggacaccaagtagccagcagcagagtgtccggccctcagagaaaaggtttgcttgttgcttctcctgcctaagtgtagaaagttatctgattccttagacaaatgtgagtctgcaaaattcccctgttgacatcacaggaataagtctgtggtgagtacatcctcagagatgatatcatctggcatcctaccatctggtctggtccccatcatgcttctgaaactgcttgttcaaaggtaacctacagggccagcctcacaggcatgcggctgacgaggtcccacaagacctcatgccctgtgctcacaagagctctgcacttggttttacactctgctgctgtcgtcatcttaaaattcttttttatttttattttttagagacagagtcgcactctgtcacccaggctagagtgcagtggtgcaatcacagctcactgcagcctccacttcccaggctcaagccatcctcctacctcagcctcccgagtagctaggactaaagtatgcaccaccatggtctgctaatttatttttctttttgtagaaagtgcatttggacaattttttttttttttctggagagacgaggtttcactatgttgcacaggccagtctcaaactcatgaggctccttggtccttggcctccgaaagtgctgagattataggcatgagccactgcacccagccttgaaattcttttttttgagacagggtcttaatgcgtcacctaggctggagtcaagtggcacgacccaggctcggtgaaacctctgcttcctgggttcaagtgattctcgtgcctcagcctcccaaatagctgggattacaggtgtgtgccacctcagcccagttaattttttgtatttttagtagagatggtgtttcgccacattggccaggctggtctcaaattcctggcctcaagtgatccacccacctcggcctcccgaagagctaggattacaggcgtgagccaccatacctggcaaggccttgaaattcttaagttttcacctgggtgtggtggctcacatctgtaatcccagcactttgggaggccgaagtgggtggatcactagaggtcgggagttcaagaccagcctggccaatatggtgaaaccctgtctctactaaaaatacaaaaattagccgggtttggtcggcaggcacctgtagtctcagctactcgggagactaaggcaggagagtcgttttaacctgggaggcagaggttgcagtgagccaaggttgtggcactgcactccagcctgggccacagagtgagactttatctaaaaaaaaaaaaaaaaaaaaaggaagaaattcttaacaggtttttgaaacaagggacccccccacacacaccccatttttattttgcactcagctctacaattccgtgtccagtcctggtcacccatagtcttccaaaatccagcaagaaaaatccttctcagaaaggtctccaatgcgtatgacctcatcttccttcgtgtaagtatatccacccctagtctctgtgacaccccactctcctgttctcttccacctctctgacctggcaggagggcttccaggttccgtacaatacaataccgtgggtaccatcaggctcaacgtgcaaggatgtagggtattggtatgtgtggcagagaggcacagaggtaagagctgctagcaggcaatggaaagtggttggacaaggagttagaaaactgggctctggtctttggccactgactcattgtgtaactctggtcacattctgggcctcagtttaccggtctgcaaactaaggagggatcaactggctggtcccttcctttgagctctatcaatcattgaggctctgaatcccagcaccgaactggagatagtgtgggtaggatggtgccataggaggcaccatgtggttggacttgagggtcaagggagttgcaggggataagccaccatgggctaaggaatgagatgggtcatccacatggatcacatctatgaccctttgtcacctctgcccctgcacagcatacgagaggaggtgaaggggaaaagcctggcgtgggtaatgaaatcatggaggaagaccatgatgtgttctggaagtcagtaatcctaacaactagcctttgcacagcacttcacaaagtaccttcacatccactcaaccctggcgggtcctcccaaccctgcagcagtgtcaggtgacatgcccaggtcacacactaatctcatcttctgccttgaaatccttccttcccactacccagtgaacattaggagagggtggtatcacggagtggcgtggcctgcaaatgatgcctgggatagggacaccctgggggaacaagtcatccaagccatctttggtgcccaggcctgagggagagttcaaagtgccaacctgagagtccagggctctagcaaactgagagaacctgagtcagttctcatccagatcataaaatcagcaggaaaactcagagatgaccacatcaggcttcaggtgccttaaagaactccttccaactcctagagaagcaatcaatctaccacgcagagaacaaactgaaattgaaccacagcacccctggcaggcaggaggtctgggcactgcgaggagccaggaaatgaggaaccctggacagacatgttttccaaggaaagactaggggaagtttgctcaccgtggaagaaggggccaccgagcatggaagaatgtgccatggcgtgaaagaatggcagaagggagtagggagaggaatggagttgggggaatacaggttgctggagacactggatgtgagatggggcccacccagttctgcccgccaggcctgccaagcagggatccttctgcccagccaggttctgggtaaggaagaggagttctgggaagcagtttcagccttggggagtgagggaagatggcagcatcaaggccttgggaggggagcctggtgcagggaatggaattgggtcctggtctccccacaacagagttcatcagggtccaggatctgccctctcttggcattgcctggccacaccatggctcaggtatccgacacctgggcccagagtcacatgccaggaaacccaacactcttgggtcccagcccccaacttccagcagctacgagcaaacagggcttctggaggaggaagcgggtctccagagcccagcagcagggagcctacgtccagggacagggcatctgcactggagaaggctctgccaccaacaggggtgagaggaatggaggaggacggggaggaggagggaggaagtacagagcagagaggacagagctggggcaggcagaggggtggatgctcccggaaaaggggtagatgggcatagaaggtggggccagaggtctattttacctagtcacctggcctagctggatgccctgacaccctgtcgctcatccgtccccttgtctccatcacgcgagtgccaaccagaccctctggtgcctacctagcccacttggcagccacccaggtaggtaggggaagaagactttattccaatgagagaaatcaacacatggacagaggcagaaacttagaaacccccagacccagaatgaccaacaaggcctcacagattaaccttctagaatcaacagaccctaaaagagtttcaagtgcaagagaccctttacccaaaagaccctattgaggagacttaaatcaagagagaccccaataaggaagtgaaaaagtcacccaggcttgagagaagcccccagagaagaggccccagcccaaaaagactccccagagggacctcgggaggagaaagctggcagtggggcatgcgattctcttgactcactcctcctttatgtggcctttccttccccagatcctactgcactccaggactatgccaatttatggccatgctcccaacagcaggtcacctcctgcccctcctgctggtgataggcacagggggtactgtgcccagcccccaggtgcctccccggggctgttatgtggcaaaggaagcaggtgaacggacgttccgctgcagccaggcaggcctcagtgctgtgccctccggcatccccaatgacacccgcaagctctacctggatgccaaccagctggcatcggtgcctgctggtgccttccagcacctgcctgtcctggaggagttggatctgtcccataatgcccttgcccacctctcaggggcggctttccagggcctggagggcacattgcgccacctcgacctctctgccaaccagctggcctcagtgcccgtggaggcctttgtggggctacagatccaagtgaacctatccgcaaacccatggcactgtgactgcgccctccaggaagtgctccggcaggtgaggctggtgccgggcactgggacaggcatcgtgtgtggctcaggagcccgaccggacctcgtggggcaggagttcctgctgctggcaggggaggaagagctgtgtgggtcggggtggggtggggcccggaggagcaccgatgtggccctgctggtcaccatggggggctggctgacactcatggtggcttatctggtgcattatgtgtggcagaaccgagatgagaccaggcgctccctcaagcgggccccagtgctgcccgtgcgttccgaggactcctccatcctcagcacagtggtctgatgacccaggatgctcctccagccacaccccacactcctgcccctatgccctctcctttgctctgaccccctctgcctcctgtgcagcttcacccctgcccccaagcccatcccacccctccctcctttattccccctaaatacctgtgctggttctctctctctctctctgtgtcgtcttaaccaacaccatctttggtgcctggagttttttggtgcctactctgtgcctggattgtgctagactcagaaaacccataacagagaatgacagcaggtggggtgggagcaagggaggaggggctgtgggggggcaggttgaggagggagcctgcacctggcccagggcgatttcaaaggcttcgctgtaggatgtttgaactgattcttttttttttgagatggagtctcactgtgtcagcagactggagtgcagtggcaggatctccgctcactgcaacctctgcctcccaggttcaagtgattctcctgcctcagcctcctgagtagctgggactacaggcgcgcgccaccacgcccagctaatttttgtattttttagtagagttggggtttcaccatgttggccaggatggtcttgatctcttgacctcgtgatctgcccgccttggcctcccaaagtgctaggattacaggcgtgagcgcgccaggcccgaactgactcaggtgggtggatcacccaaggcagcacgcaacgtgaaccccttgggcgattacaggcccacacagcccgtccaccaccagcttcttcctgccctacagagctgaggcctggagtggcagagaaagccaagggtaccctgagggagcccccagctgagggggagtgaagccccaccctttcctgaattgggctcacaaacagaggcttcgagagcgcaactctaagactgaggtctcctacagagtgaggggcatcaaagcgagaggcaacccggggagcttattccaaagggagggactgcctcccccattggactaaagggagttcaaactgctagaaatgattttgccttaggtctctgagaatctgccatcatcaacctctcttacctccaaggaacccatctctactaaaaatacaaaaaatcagccgggcgtggtggcaggcacctgtaatcccagctactcatgaggctgaggcaggagaatcacttgatcccaggaggttgaggttgcagtgagctgagatcacaccactgcactccagcctgggccacagatcgagaccttctctaaaaaaaaaaaaaaaaagaacagggagagctttggacagaaaagcaagagcagagaaggcccctagatgaaaggtgtggacaaggcaaggaagatgtgcaacaactcagaatgtctgggcagcagcaagactcaccctggggctggaagagagggtgcaaagaggggcaaggggaaggtgggtggaaccaagctggaggcgaggtcaaaagccaggctgtggccagatttaaaaggacactgtgggctcctcctgtcttctccctccgcctctactgagagcctcccctggcttcttgcttctcttgtccccaggctcctcttcctcctgtgccctctactgaggatcccctcctccgactcaaggtccctaaccagagactccctatttctctccgtcctctcctttatacactgattagtttcctgagctccttcttctggggggaaggtggtctcctctatgactgagctggggatgggtgactgcagagctgggggaagtaaggagaccctggacaactcaataaagtcacttttatcaatgctccgatctcgtattgctcattttcctgggcacctgtggcctgttggtgaagagaacgggtgctgagcttgtcttcagcccctccaccacccctttggtcgggggtgctcctgctgggctggaggccagcttcccatctccccttctgctccccagcccctgccaccagagtccatctgctggactggccaggactgtgccgacacactcagagcggctcctgcatggaacgactgccccagaatcccggactgctccctctgcatcctgaccccgggcttgtgcttgtccactgggcaggcaggagggggtgacgtaactggcttcactcccatcctcacctctgccatggaccagggatcacaggaccctgggttttgagaaaccacggaagcctggtgaggcagctggacagcctcggtgatgttgcccgcatctgcccttctgcctgggacagagggagagaaaaggcacgctcttctgggagacacactgtgtcagtcccaaactctcccaccaggaaatgctggaacctggctcaggaaccaagacagcccagcctacagctaacccaggcctgaggcaagagttcccgcggcctgggcccaggtcccaacttgtcaccacatgcagcatcagggagccagtgggctgtgatgagaggagagggagaggcctaaaactgcctttgcaaaatgatgactgagacagtgaaagagatttaacttaactgattccatcttgcttttaacctccaagctgtccccgctcattcctaggcataggctgaactaactttgggaaaaacttagtttatagtttaaacaaagacagtaacagccctttcccaaagcagacctccttcttgcctggggactagattgcctttgtagaactaacattagccacaagatcagaaattatggtttaggagtcgtgccgctggaggctccctaaactgctccgaagatcagggcttgagatattttgcagaccctgcacttgatggatcagctggccccacccagatcaataaactggctcctctgatcttgtggcccccacccaggaactgactgagcacaagaagacagctttgactccctgtgatttcatctctgaccaatcagcacacctggttcactggcttccccgcaacccaccaagttatccttaaaaactctgcccccgacgtgctcatagagactgatttgagtaataataaagctctggtctccacacagccggctctgcatgaattactctttctctattgcaattcccccgtcttgataaatcggctctgtctaggcagcacgcaacctgaaccccttggacgattacaggcccacacagcccttccgccaccagcttcttcctgccctacagagctgaggcctggagtggcagagaaagccaagggtaccctgagggagcacccagctgagggggagtgaagctccaccccttcctgaattgggctcacaaacagaggcttcgagagcacaaccctaagactgaggtctcctacagagtgaggggcatcaaagccagaggaacccggggagcttattccaaagggagggactgcctcccccattggactaaagggagttcgaactgctagaaatggtttcgccttagctctctgagaatctgccatcatcaacctctcttacctccaaggaacagtcaccccaaaccaggaaggcaaagggaaagcagaacaaggcccccaagctgccaaatggatgccaccacaagcccaccccttcattcgacaagaatctgttggtcgggcgcggtggctccagccagtaatcccagcactttgggagaccaaggtgggccctgagctcaggagttcgagaccagcctggccaagatggtgaaaccccgtctctactaaaaatacaaaaattagccgggtgtggtggtgcgggcctgtaatcctagctactcaagaggctgaggcaggaggatcgcttgaacccaggaggcagaggttgcagtgagccaagaccgtgccactacactccagcctgggtgacagaatgagactctgtctcaaaacaaacaaacaaacaccatccgttgagttcctgtgcatggcaggcgctgcaactacaaagatcaggaagttgtgcctgaccctggggacctgacaggctagtgtatcagtgatgacagtccaggaagacagggctgtgcacaggggccctgtgaacccataaggagcatctcaatcaaacaccgacaaagggtcatgtactttgctcacaggaaccctcgctcagaactcatttattcttagtttacaagagttctaataatttcagaactgtggcttcctgcttatatcaagttagaaacagtatttctgaagtagcaaaaattatattacagagggtcagaataacagcagtgagaaagtacaccctaacgacggggagggacatgattaaaagtctaagaactcaaaaggcattgtcacagggcattttagtgtctcttaaatggccctgtgtggaaaactgactccccctgcctcacaggggcctatgggcattggcaaaatgcatgagatcagtacattgacttcgggttacctgcagaaaagttcaaatcttggagtgtccattctcagaagcagggagctggtgatgcacttgagaaagaatttccatcaaggactgaagtaaataaggcagaatgactattggaaaatgctacttcaacctcaactacttccttgttccttcttcccactggtcgaagatctgcccctggggccatgcaaaacaaaccagcctaaaagcctagtctttttttttcttttttctttttttttttatttagagacagggtctcactctttctcccaggctggagtgcagtggcgtgatcacagcttttatgtcccactaccaccacacacgcatatgtgagcacacacacacgtatctgcctcgggcccctgtaatgcagttgatcttccccaatcataatatatatttcagccgggcacagtggctcacgcctgtaatcccagcacttcgggaggccgaggctggtggatcacctgaggttgggagttcaagaccagcctggccaacctggcaaaaacccgtctccactaaaaatacaaaaattagctgggcatggtggcgggcgcctgtaatcccagctactcaggaggctgaggcagaagaatcacttgaacccgggaggcagaggttgcagtgagctgagatcacgccgttgcactccagcctgagtgacagagtgagaatccgtctcaaaaaaaaaatatatatatatatatgtttctacacttatgacaactgccatcttcctcttttagaacaccaaacaaaacttaagcccccacactaatactaatgtctaaggtcagccctcacttctcattcacttttggggccaaggcaatttatcagggaatgtttccagcagagggtgtatgggaacgagcacagggcacatctgtcctgtagaactaagaaaagactcaagatcaccaagactgcagtcacaggggtcctggtgaatgcctctgtcactgtcgaaggcaaatgtcaaaactccctggacatccaaaacctcagccatcatcgtgaatgatctggaaaacctgaggaagaggcgagcttgcagggtggggtgaggaggcaggttgaggattccaggccagatgctagaggctggtacagaggaatagcacccacccagaatagcacggactgctcaagttggcagggatctctattttacaaaagggcccaaagagaggcagcgagttatccaaggtcacatagggagggaaggaaagaaccaggactagaatccacagggccctgtccctctgggacatacacatactccccttccaggggaatgaaataagggagagatagggagagacaaccatgagcccagggtgcagctgaaatgggcagagggtctacccactcgcaacctctgacagcctctgagtctagccccaccccttccacaaagctgaagtaggcagagcagtccttcctccagaagcttccggaggatggggagaatctatacgtggtgaccaagaccatggagatgctgaagaaggggggtaaggccagaggggcagttccatccccgacctcactgctgtggggctcaaggttgggaatctctgagatgccttctctgccccatcccttccatgcacacttgcccctctccttcccccacgcagcccctactctcctctgcattctatgccatttcccttcacacttttatcttttctaaggactttttcatctatcatctcacaggaatcccctgaggaaggcaaaattgctattgcaatcaccatttcgtacagtttaggaaactggactttggaaaagtccagggactgacccaaggtcaatctgtgagcaaagcccaggttttgagattcccagctggctctttcgccaggcagctccactgcagccagggttctcccaccatctgccagggttcccttctttcattctctcccatctcctcccctcccctcccctccctgccctgtggacagctgcatttcccagggctctctgtttccacacgggagcatcatcatggcctttctccccaagcagtgggtcactggggaggagagctggagtcacagagtacagtgtgagggagggaaggggaggggaggcggcctcccaagggacggttcctactctgagccaagccctcagagctgagctgaagtctggaagtttggagtcttccatttctgtttgggctctgccccccaaaccagctggcgactccaccccctcctgggtccctcccaatccctattccacatcccctgctgtgtggctccctaatgcctgcacctacgtgtcccctcctggaggcaacactatatatattgggtgcaggggcgggtgggggtgggaagggacagagaagtcagagacagccagtgcccagtgccccatttcttcttttttttgagacagagtctcgcccttgttgcccagactggagtgcaatggtgcgatcttggctcactgcaatctccgcctcctgggttcaagcaattctcctgcctcagcctcctgagtagctgggactacaggcgcacaccaccacacctagctaattttgtgtttttagtagagatgggagagaatccacggggccctgtccctctgggacacacacacactccccttccagtggaatgaaataggagagatagggagagacagtttcaccatgttggccaggctggtctcaaactcctgttctcatgtgatccacctgcctcagcctcccaaagtgttgggattacaggcgtgagccaccacacctggccacagtgccccatttctgaccttcacagacatcccccatccaagaacaagaagctgaaaatgccctcagaaggtcagagaagcagagggctcttctccccatccccaacccaaaggtggacaaaaccttagaaggtgagagggacacagagacccctttcctaagcaaaggaaagaaatctgtcaagtcagcagctgaagcccagagccccttcgcaagggaaagactttggggtgatggtgggtgggatgcagaggggtcccctggacattggcgggacgtagtgctgactgtgatggcagccacgggtttcttgggccttttcggtgcatcctccccgcaagcctccaccacgctgttccaggtaggctgaggttaggcccactcagggcggcaccttggcgcaggacacctcttccgtttgggctttccgtcctcgtgatttcgctctccatctgacagtcatccatggtgacagggtgtgtccctttcccctaaacaggatcctcaatgcccatcggaaaacgttgtaaggcgttgagcccccaacgccccctcaccacaagaccctgctgtgaccatcttttcctggtgaggagagtctgcacgggggagcagggcgccataccccagaaagaaacctctgtgcctgggagtgagggactcgctgagtaaagtgaggtcgaagagggtggagaggggtagggtcccagtcaccactgtcctgaacccacagttcagtccgggcccaagatggccccacaggagcacagggggtttcgggcgctgcaggtggaggtgaaggaccagctgcggtgcggaaaggcctgacccgggcggcagatcgcctgcggagagaatgaccggctggggtggaggcggggctggggtggtgtgggcgtggctggggaggcgtggctggtgtggtaggcttaagcagtgagggcgggactggggcagaggcggggtttgggcgctgagggcggggctggggctttgaggaggtggctggggctggggcgaggctggtgcggaggcggggttggggcggtgagggcggggctggggcagaggcggggctggcggagtgaaggcggggctggggtggtgagggcggggctggtgcggaggcggtgcgggggaggtgtgggtggggctggggccgagacggagtttgggcagtaagggcggggctggtgcggaggctgggctggtgcggtgagggcggggctgggtggaggcggggctggggtagaggcggggctggggcggggtgggcggaattgcgggctgcggggcagagatggtgatggcgtccggggggcggggctgggtggacggccggactacaagggacgagaggctgggcttaaggtagcagggggcagagcggattgcccaggggcggggcgggatcggggacaaggctcaagtgctgaggaccagacatgcgccggaagcccaagcccggctagcgagtaggagggtggatggtgggggatgataggctaggcttaagatggctgagggcggggatacaaggtggtagggccagagatgggctggatggggcgtgatcggcctcctcctgggagatctcagcccacctgagtaggcttcttccggccgcaagagagactggggcctggccctgatggaatggccattctgagcgtgaagacctgcgtccccctcccttcaggaagctccctgtctctcaaatttcagggggatcatcacttcccatctctctgccaggttgatcgagttctggatctacaggagccagttctgagagggaggactgggggtaggaacggggtctttgaatggctgcgggactgcaggagacttccagcaacctcagctccatgttggaggaacattctgtacctgctgggtgctctgtgtggtgagggtcagggatgagggtgagggccatccctgatgtaccaggcctactaggttaggcccaatggtaccaagcaagacctaccacaaaagttaagggtcccagtgcaaaatgaaaatgcaggactccttgctacaaaagttattaagaattatatttggccagacgtggtggctcacgcctgtaatcccagcactttgggaggccaaggtgggggccaatcacctgaggtcaggggttcgagaccagcctggccaacatggtgaaacccccgtctctactaaagatacaaatttagccaggtgttgtggcacatgcctataatcccagctacttgggaggctgaggcaggagaatcgctcgaacatgggaggcggagtttgcagtgagctgagacctcgccattgcactccagcctgggcaacaagagcaaaactcaaaaaaaaaaaaaattatattcaagacagtagcagcagagcattaaacgaagcatggggctgtgtgcaactgcacaggttgcatgcccatgaagccagccctgataccaagctacaagcagagtgggcagggtgcagaccctattgtcccttcctccaaggaaaaggcaagaggggcaagcccacctaccatccctacgccagctcatttttcccaaaaggggaaaagggaacataccattccaggaatctcctctcatcctctcctggaggagaaaaaatgaatctgccgcccacttcccctccacggacacacatgggagctaaccccagttcccagagccactttttttttttttttttttttttggagacggagtctctctctgttgcccaggctggagtacagcagtgggatctcagctcactgcaacctctgcctcccaggttcaagcaattctcctgcctcagcctcccgagtagctgggattacaggcatgtaccaccacacccagctaatttgtgtatttttagtagatgggatttccccatcacggccaggttggtctcaaactcctgacctcaagtgatccgctcccctcagcttcccaaagtgctgggattacaggtgtgaaccaccacacccggcccccagagccactttacaatgccctgcccacagaaggagggagagcatgccgtgtccctcatgccctttcctctcctttaccctctgcagagctgagtgaggtgcaacagcagctgctggccatgtccagggagaaggggatcctttcccaataggtggagctggagagggacctgggggatgacaacgaggagaaaattgagtttgagctcatccagctccacccccacacttgtggatgggcagtctgaggcccagagagcacacaagactttagggccacacagcaggctcttagcagaactctctacagaacttaggtctccggattcttaatccttgcccatctctgcttcactctagcattaacagacagaggggggatcaaggatggggactgtaataaaatagcttgttgaatagcaagagaggctgggtgcggtggctcacacctacaatcccagaactttgggaggccgaggcaggaggattgcttgaggccaagagttccacaccagcttgggcaacatagccagaccccatctctatttaatataggaaataataaaaaataaaaagtaaaagaatggcagtgtgatgccaccttgaagcaaaactgccatggtgactggtattggattcctgattctggcagcaaagtccttaaacaatgcctgtagcatagataacccctgtattagtccattctcacactgctgtgaagaaatacctgagactgggtaatttataagggaaagacatttaattgactcacagttccacattgctggggaggcctcaggaaacttaaaattatggcggaaaggaaaagagaagaagacaccttcacagagcagcaggacagagtgaatgcaagcaggggaaatgccagatacttataaaaccatcagatctcatgagactcactcatgatcatgaaaacagcataggggtaaccacccccatcactcaattacctccacccggtcccacccccaacacatggggattatggtgattataattcaagataagattttgggtgggggacacagcgaaaccataccaacccgtcataaagcaacaatgcctgtaacacagataatccctcatatagatgtgtatctaacctccccagtggccatgacttttgcaagacagtctgagccatgactggctgcacctgtttcactctaaaggcttgttatagaaaagatattttctggacagcaggtgtggggaaccacttttgttcataagtccctattaaatgtttctttctaagaagctggatttgtcagcctctttctttctttctttcttttctttcctttctttcctttctttctttctttctttcttctttctttttctgagacgaagtctcgctgttgtcccccaggctggagtacaatggcgtgatctcggctcactgcaactccgcctcctgggttcaagcgattctcctacctcagcctcccaaatagctgggattacaggcgtctgccaccacgcccagctaatttttgtatttttagtagagatgggagttcactatgctggccaggctggtctcaaactcctgacctcaaataatccgcccgcctcggcctcccaaagtgctggaattacaggcgtgagctaccacgtctggcctgtcagtctccttctttggcctttcgattcccttggcctttgggggtaggtttgcagatatctgctcactgcagaacagcgacaggggctgaaatttaaatttttactgaaaattaaaatttaaaattttactgcaggccaggcatggtggctcacacctgtaatcccagcacttagggaggccaaggcagacagatcacctgaggtcaggagttcgagacccatctggccaacctggtgaaaccccatctctactaaaaatacaaaaattagctgggcatggtggtatgttcctgtacatacagctacttgtggggctgagtcaggagacttgcttgaacctgggaggcagaggctgcagtgagccgagatcgtgccactgcactccagcctgggcgatagaggaagactctgtctcaaaaatagacagacagacagacagacagacagacagataataaaatacaattttactgcagaccacttctgaagttggtggctccctaaatgcaaagcatcctgtgatgctttttctccactgtgcagatggaaaccatcctggactagaatttctttcagggagagatggagcccttctgtctttactttgagctgctcagggggttctgaggtgaggagctgaaagtggtcaggccctgatgggactctgtggccttgacatataaggagaccaaggagacagatcctccttacacctgggagccaaatgccttgacactgctctgtgtcctgtaagccagcctctccatctttcgggtgctggccaacaacacttggctctccagatattttattcatcagggatccccagccctgcccgcccatggctagggaaggcaggatggggcttgaggacaagcctaggggagctggtgaaaatacagaatagtggccgggcgcggtggctcatgcctataatcccagcactttggaaggccgaggtgggtggatcacctgaggtcaggagttcgagaccagcctggccaacatggtgaaaccccatctatactgaaaatgcaacaattattcgggtgtggtgtcgcgcatctgcaatcccagctactcgggaggctgaggcaggagaatcgcttgaacccggggggcggagtttgcagtgagccaagattggcactccagcctgaacaacaagagcgaaactcaatctcaaaaaaaaaagaaagaaaaagaaaaaaaaatacagaaaagctccaacacatgctcccgtgcatcagcaggggctcaggaagaggtgggttgctgggaggatcacctgacagaagagagttctctgggtttgggctggaggctggcagtggcctccttgcccagacagggctgatgggtagggggattggcagtggaggggtgggggcagtgagggctgacaccttgaagctggatgctgagtttgacacacttagagctgaacactgatgtctgttcagccagagtctggggaggtcttggactccaaagctgatttgggaatttgggaagaaacattaaagctttttagagaataaggaaagagtatgggagctttactctgttcagaaaggagaatttatggaagtatagctcacaatctatgatctgcacccccaaacatccaacctcccatatgagagataaaacacagcatccctaggaagcattattcctgcgcctccaccaggcagtcatgccccagcccagcctgtcttcatccctaaccattaccattccacctccttttgttcagggcaggtctgggaatatgttcatgtgagggatcacttcttgcaaatgctccagttatcctgcacccttcaagtaggctccaaatcctacaacattctccttgccctcccaactcgcagggtgccagcttcttcccattctggccagagtttgtgacttccatgaacgcccataatctacttttctctgttttctctgaccccatgctgagggggaaatcaacaataataaaaaggaggccaggcacagtggatcacacctgtaatcccagcaatttgggaggccaaggtgggtgtatcacttgaggccaggagttcgagaccagcctggccaatgtggtgaaactttgcctctactaaaaacacaaaaaatagcccggtgtggtggtgcgcacctgtagtcccaggtactcgggaggctgaggcaggagaatcacttgaacctgggaggcggaggttgcagtgaaccgagattgtgccactgcactccagccagcaatagtgtgaggctcggtctcaaaaaacaacaacaaaaacaataacaaaagggaaaatgagtaaggaaataatgccctgtcccaatgactgtgtctgtctgcagtgcactctatgggtcagagagacagcaatggtcccacggggcaggtgcctggggcttcctctcctaaatcaattctctctcctgatccctgtctcctaacaaccctacatagtcacaagcttggtctctaaatcagaggtgatcattgtccatcactaccttaattgaccaccagagggaggtagagagcaaagtttaccgcctgcctgagcagcactcaccgcatgaccaggtcctgcttccttattgtctcttttaattgacctgaagcgtccttacaaggcagtctaacttaaatatccgccagtacaatttaaattctgccccaggccgggcgcagtggctcacgcctgtaaccccagcactttgggagaccgaggcaggaggactgcttgagcctaggagttcaagatcagcctgagcaacatagggagactcccttctctacaaaaaattaaaaagtgagccaggcatggccgggcgcagtggctcaagcctgtaatcctagcactttgggaggccgaggcgggcagatcacgaggtcaggagatcgagaccatcctggctaacatggtgaaaccccgtctttactaaaaatacaaaaaattagccaagcgtggtggtgcgtgcctgtaatcccagctattttggaggctgaggtaggagaatcgcttgaacccgggaggcggaggttgcagtgagccaatattgtgccattgcactccagcctgggcgataagagcaagactccatctcaaaaaaaaaaaaaaaaaagccaggtgtggtgacacatgcctatagttccaggtactgggagcagggagcgggcactgagatgagagaatccctttagcccaggaagtcaaggctgcagtgagccatgactgcaccactgcactccagcctgggcaacagagtgagaacctgtctcaaaaaaaaaaaaaaacagaaagaaagaaagaaaagaaaaagacgcagctgggcacggtagctcacgcttgtaatcccagcaccttcagaggccgaggtgggtggatcacctgaggtcaggagttcgagaccagcctggcgaacagggttgaaaccccgtctttactaaaaatacaaaaattagttgggagcggtggcatgtgcttgtaacccagctactcgggaggctgaggtaggagaattgcttgaacccaggaggcggaggttgcagtgagccgagattacaccactgccctccagcctgggagacagagtgaggctccatctcaaaaaaaaaaaaaagaaaagaaagaaaaagaggcagggcaccctggatgggaggaaggagcaccaccaagacaagcctaaatgtggatattttcattccaaaagcacaagaacttcaacctggctgaccccacaagcccatatatctcctccctgccttgaactcaccaagccccctgcttggaataccagtaggcagtctgagggaatgggacaatgtggtgcaggcagggtcgggacgacaccaggagtgtgaggacaggcccggcagagtgctctgagatcagactgaaggcgggagaaatgagagaagcaagacttcccggtcagaggagagaaagctgactagatgggctttgcaggtccttggggagagcagagccacgtgtggcttttagatgccactgttctccagatctttgcagaatccactaaactaggaaccttggcctgcagccagtgggagaagggtagtcactgggaagaaactcccaaaagtctgaccgaggcaatgctaggctggtgagagggtgggagtgggactatcttccctggagctgattaaggcataaggagactgcacagcctcaggactatatgctgaaatgcaggcatcacgtcagtgtagtggctgagagatacaaggaggaagaggtggaaatccaggaaaacagacagagatgaaaggactataacacacacagcaggtttctatgtaaatatgtgcttgtgatagggaccagatgactaacgacaaccttttttttctttttcttttttttttttttgaatcggagtcttgctctgtcgcccagcctggcatgcagtggcacgatctcggctcactgcaacctccacctcccgggttcaagtgattctcctgcctcagcctcccaagtagctgggattacaggcacctgccaccacgcccagctaatttttgcagttttggtagagatggtgtttccctcatgttggccaggctggtctcgaactcctgacctcaggtgatccacccacttctgcctcccaaagtgctggaattacagccgtgaaccaccgcacccagcctaacgacaaccttcccacacactcaagcccccacctctgcctctcctaaggagaagggacatttgattgctggaatggctggagctgtggaaggaggatgaagtattgggtggctgcagtgagccatgatcaagccactgcgctccagcctgggtgacagagcgaggccccgtctcaaaaaggtgtagggtggatgggaaagtatgtaaagaaaaagagagtgagcagggaccagagaggcagaggcaaggcttggctttgttctgtttcaagacatagagaagagatatttgggagcatctgtcatattgaatgagactttggggacacaagtggagtaatgactattttagggagttttcctaagtgtggaatggtctagtctcattcaccatcagcccctcaaggaaacgttcagtaaagatggaattggccgggcgcagtggctcatcctgtaatcccagcactttgggaggccgaggcgggcggatcatgaggtcaggagatcaagaccctcctggccaacatggcgaaaccccgtctctaataaaaatacaaaactagccaggcatggtggtgcatgcctgtaatcccagctactcgggaggctgaggcagagaactgtttgaacccgggaggtggaagttgcagtgagctgagattgcaccgctgcactccagcctggaggacagagcgagactccttctcaaaaaaaaaaaagatggaatttactcttcacagcattcagggttgcgtttctttttccatgagtggtactaagaagagcctcaaggtgggagcaggaaggctctgctgtgtcaggttatacctgcacatatgcatggccacatggcccaacactgtaagggccttgcttgtaagtcccttattctgtcctctagcaatgtgaccatgtaggcaacatttgaaattcctttaaaattccttctaggcagagatttaagctaagaggaggacctgagtgacctctggtgcaacatctgaaagcccacgacaagcctcctgggcttttccatgaatatcgccgtgcccctgcctacggatatgctgatgtgtgtatacaatattctgtgagaagcagagacgctgaacactaaacaacacaaacccatttggtctaactccatctctgcctactcagacatctgcttctagcggtatcagagttatgtctatgtagctaaaacaaatggagtaaggcagcaatacacacaggctgacaagcccaggatggagggcggcactgcagatgctctgctctctactggaatgtgtggacatacaggaatccctatcccaggacacccgcagacccccaccatgaatccgagatgctccccaatgacggtgatgatgacagaacagagatgccatccctggtcacacacacacacacacacacacacacactcccactgcctccctctgcacccctcccaaaggcacctgccttcctctcctctcaatccacaagccaacctccagctgccacctctctatcagccttggctacccccacccacgctggcacctgcctggcagctccctatccaccccctcagccctcaggaggccagggcacacgtggaacaggttgatgttgttctccaggaagtggagtgggaggggggtggggtcactagggcaggcggggtccccggaagcctctgtccctgcataaagcagcctgtcctggcaagggatggtcatcctctcaacctacagacccagtgagccctaggccctcaccccagacccagctgctggataggacccagccccgctcccaggtaagaacttgatgacagcagggaaggcaggggtgctctgaggacacaggaagatgggtggaccaagaagggaatggaactcccctagagtccagtgggataagtatcccgataggccttggggagggaagggagaggcaggcctgtggacatctctctggtgaagaggaggctgctgttgcccaagcccttcccaggtgcacccaggtagcaccaggaggttgtcctgccccatcctggccctcccaggaatgagggtgaaaaaaaaaaagcaccttgaagctggcagaacagccccacgcatctgtgccgtgcttcctgccccccctgctgctgtgaagtgcctgtggtggatgtgggatgcttccaagccagctggtgtggcctcttccacccacggggataactggggtgtgccgatcggccacccagccagagcacctggactcaaacttcaaagacagagacttaagatgttgaccctcaggtcaggtgcggtggctcacacctgtaatcccagcactttgggagggtgagatgggcggatcacctgaggtcaggagttcaagaccagcctggccaacatggtgaaacaccgtctctactaaaaacacaaaaattagctgggcatggtggcaggcgcctgtaatcccagctacctgggagactgaggcaggagaatcacttgaacccaggagatggaggttgcagtgagccgagatcatgccattgcactccagcctgggcaacaagaatgaaactccatctcaaaaagaaaaaaaaaatgttgcctctcaggttcccatgggccccacattctccagggccctctcatcctagcgcacatctctcagggccacattcattggttctttccacacacatttgccaagctcgaactctgtgccaggtgtggtacttgctgctgcagaggtgactaagacccatttcctgccctctgggaagtcacagacgagttgctgatagggtcaggtgaacagatcataacaaaggaaggtgcatcagaagagcgctttggaaacacagatacagtcaccagctgcctggaggactgagggaagaggttccaggaggtgacctgaattgagcattagcggaggactagggagtcttcagatccggaagcgggtattgtaagcagagggggcaaaggtgaagagcatcaaaatgcctggatcctggctgggcacagaggctcacacctgtaatcacagtactttgggaggtcaaggagggcggatcatttgaggtcaggagttcgagaccagcctgaccaacatggtgaaaccctgtctccattaaaaatacaaaaattagccaggcgtggtggcacacacctgcagtcccagctactcgggaggctgaggcaggagaatcgcttgaatctgagaggtggagactgcagggagccgagatggcaccactgcactccaccctgggcaacagagtaagactccatctcaaaaagaaaaaaaaaagtctggatccaggcatcccccaggggctgtgagaggggagtgggtgtactcatacctgtggcacgcatgagggaaggacagggtgcagggaagtgtaacccacacatggaaagggcaactggggcaggtgaacagcttggccacccaggctcttgttgccagcagcatctccttccctcccctggtgtcctccgactctggctattgctagtctctggtgtgagagaaagctttacttccattgctaaataaatgctctagaccaggcgcagtggctcacacctgtaatcccagcacttcgggaggctgaggtgggaggatcacttgagccaggagtttgagaccagcctgggaaacatagtgagactctgtctctacaaaaaaaatttaaaaattagccaagtgcatgactgcagtcccagctactcaggaggctgaagtgggaggatcaattaagccttggcggtcaaggctgcagtgagctgtgatcacgccactgcactccaacctgggcaacagagtaagaccctgtctcggaagaaaagagaagaaagcaaagcaaggaaaggcgaggtggagggaaggaaggaagggaaggaaggaaggaagggagagggggaagaaagaaagaggaaagaaagaaagaaggaaggaaggaagaaagggagggagggagagaaagaaagaaggaaggaaggaaggaaagaaagaaagaaagagaaataaataaagaaagaaagaaagaaagaaaaagaaaagaaagaaaagaagtgctccagctgggctccgtggcagtgaagaaaatgagcgtggagtgagaaaaatgcccttgacaaagaaaagggaggtgtggctttgctggccatctgtgggactttggggcaactctttcaactctccagccctaggttcctcatcataaaatgcagactcccttgattctttccagctgtgacatgagacaatccaggcatctctaagagctcctcctgcctcagagccgggtaaactctctctgcaggggcccagcctatatcccgggctccttggcagccttggcagccaccttgacactctcctgtctccccacctccacagagacaatgaccatgtttgaaaatgtcacccgggccctggccagacagctaaaccctcgaggggacctgacaccacttgacagcctcatcgacttcaagcgcttccatcccttctgcctggtgctgaggaagaggaagagcacgctcttctggggggcccggtacgtccgcaccgactacacgctgctggatgtgcttgagcccggcagctcaccttcaggtcagcctcaagcggggctgggaactgagggatactgagggacaggggctgggcacctggcctgcaaggaggacctcaaagctccctctggccagaggtgattagatgtcatctagcccaaagtcatcatcaggagctgaggaggctggtggtcggggggatacctctcagctcagcctcttttatttatttacttgtttgtttttgtagagatgggttcttgctttgttgcccaggctggtttcaaactcctgggctcaagcaatccttccaccttggcctcccaaaatgctgggattacaggcatgagttactgcacccagccagcccagccccttttgtcttttccctcctgcagacccaacagacactgggaattttggctttaagaatatgctggacacccgagtggagggagatgtggatgtaccaaagacggtgaaggtgaagggaacggcagggctctcgcagaacagcactctggaggtccagacactcagtgtggctcccaaggccctggagaccgtgcaggagaggtgagagtgggcgggactgagggtctcccgggatgtgggtggggcagtgcatggaaatggtgcttggggccttgagctgaaaggtaggacccttgcactgacctttgccaatgtggtcatgacaggggagctcttggaggcaacccttctggcccatggctgcatccaggccatttcctagtcacacctcccgctgctgccaccgtctccaggaccacctccccactgtcacgcatgcacagggaagatgatgtccacactagcttgctgtgtgatcttggaaaagtcacttctcttgggacctcagttttcttttctgcaaaatgacaggattgaatgatcatctctaaggctccttctaactctaagactatgcaatacactagaaaaaggagggatgtgtcttaactgcccccagctgagacctgagcactgtgttctgctcccataaatgaagcctcctgcctgaccccaatacacactaagcacgccctcgggaatgctgccccacagcacaaagggtgtggcaggtgccacattgatgctgggcaccaccggatgtttggcttgacacgggaactgacttttaagtagttaagtagtggttgaaagaaggaggtaaggactgtgaaggccagaaggaaaggctggggtagtcatccagcaagcatgtatatagtaaagcactctactacgggctggggtgcgcctagaacatctttgtccaagaaccttgcagtctaggaaggtgaaaattttaaaaacctgtgcaacagtaattataatcaaagccaagaagtgctaagtgctgtagggatggtttgactgagtcttgtggcaggtcaaagggacttctggctggggaaataagggaagatctcacagacatggcagcctctgttttgggccttgaaagatgagcagaaattgggcatgcagggctgggagaagggtattatgaaggcacacaggtgagcaatctcaaaaccaccaagggccaggaacagccagcatagcaggggcggaagaggtgcgagtagaacgagcaggaaatgcaggtgaacccaaaccatggaagaggcaagtggcagctccaggagactgaattgtaggcaccaggaagatcctgaaaatgttctgatgtgtcccatgactaatccagccagatggaggaagtgtgtcagataggggaagaggaacaggggtttgaagcagtcagacaaggcaagacacttttcttctttttttgtttgaaacagtttttcgctcttgttgcccaggctggagtgcagtggtgcaatcttggctcaccgcaacctccgcctcccaggttcaagcaattctcctgcctcagcctcacgagtagctgggtttacaggtgcccgccactacgcccggataattttttatttatttattttatttatttatttattttgagatggagtctcgctctgtcgcccaggctggagtgcagtggcacgatctcagctcactgcaaactccgcctcctgggttcaagcaattatccagcctcagcctctcaagtagctgggactacaggtgtctgtcaccacacccagctaattttttatatttttagtagagacggagtttcaccatattggctaggctgatctcgaactcctgactttgtgatctgtccgcctcggcctcccaaagttctgggattacagggaagtaatcccagttaagtagtggttgaaagaaggaggtaaggtggctcgtgagccaccacacccggctaatttttgtattattagtagagatggggtttcaccatgttagtcaggctggtcttgtactcctgacctgaggtgatccgcctgcctcagcccccaaaagtgctgggattacaggcgtgagccactgagcccggtcttttttttttttttttttttttttttgagacggagtctctctctgttgcacaggctggagtgcagtgacacgataccaggtcactgcaacctccgcttcccaggttcaagcagtcctcctgcctcagcctcctgagtagctgggattgcaggcgcacgccactacatccagctaatttttgtatttttggaagagatggggttttaccatgttggccaggctggtctcgaactcctgacctcaggtgatccgcctacctcggcctcccaaagtgctgggattacaggcgtgagccaccacccccagccaagacactgttcttctatcccatgagcaacgaaaactgaggacccgagctggggaagggcaagaggagtgaagagggaggaatggatgcaatgcccattgccaacggtgatagaatggcctgggcttggtagctgattgcaggatgagggaaagggttttgtcaaaggtgactgcgagattttacccaggttgtgacattataggacattaaagctaccattacaggtgacaaacaggaagacacaggttagaggtagatttggagattgtgagttccttttggatgttttgagtttctggttctgctgagacatcagctgagcatgttgaacaggtgattggaaataagggcctggagctcaggaaagaggtcaaagtgaagatacacacaaggtaatcagcactataaagattaaaactgtaggagccaggggaggagtctcactcccgtaagcccagcactttgggaagccaaggcaggattgcttgagcccaggagttcaaaccagcctgggcaagagagtgaaacccccatctccacaaaaaacgcaatattagccgggcatggtggtgcgcctagagtcccagctactcaggaggttgaggcaaggggatcacttaagcccaagagctcaagtctgcagtgagttatgatcgagccactgcacttcagcctgggcaacagagtgggaccttaaaaaaaaaaaaaaagaaaaaactataggagtgagttgggtgtggggagcttttagagggagttgagaaaacaggactgagaacagaatcttacagaacataaaattttagagaaccaaagaaactggaaaatgaggtgcagacagaatggataagatttaggaactagaagtactggagttgagccagggtggtacactgtgactggaagccaagagaagccagcgttgcacggagggtttccacagcaggatcgagtattgcacagagttaggcgaggtcattgagactgacaggtaagagatcattgtaatttcagctgagtagtggaaatacaaggcaaattataaagaatttaggtggaccgggcatggtggctcacatctgtaatcccagctattcaggaggctgagggagaagaatcgcttgaacccgggaggcagaggttgtagtgagccaagatcgtgccactgcactccagcctgggtgacagagtgagtgagactccgtctcaaaaaaaaaaagaatttttttgatatatttgccaatgaaatgaaggaaaaaatagggtagtaatttgagggagtggcatgatcaaagcaaacaaatttgttaggattagggagtttatatatggaagcagacagaaggagcaagtggagaggaggaactggtgttaacagcaagagagagcataagatgtggagagaaaggatcccagagagatgaatggggaggaaagagggggggagcatctacccccgggatcccagagagatgaatggggaggaaagagggggggagcatctacccccgaactggaggaaaagggggtaagaagcacccaagaggccctgttcctggccaggtgctggcccaattaccgagtttatctctgagcaacccaggaggtcagcatcattatactcatttcatagatgaggcaattaagactcagagaagctgccctgccagtaagcatgagatctgggtttcaacctcagccctagtccagagtcctcactccttccctgccaccacaatgtctagttcctgggaatgacagaaggaaagaggagggtgtggtacaggcaggaaggagctctgaacggttcccttatgtttctcctgcaacaggaagctggcagcagaccacccattcctgaaggagatgcaagatcaaggggagaacctgtatgtggtgatggaggtggtggagacggtgcaggaggtcacactggagcgagccggcaaggcagaggcctgcttctccctccccttcttcgccccattggggctacaggtttgattcaaacacacacacacacacacacacacactctcacactcacactcacacatacacatttacattcagcccctccttggaggcttcattagctttgcctgatcagcgcccaccgaggatgctgaaaagggccactccttcccccggctcttaaagatccaaaccccagacatatgccccctccctggtcagtggcacccagtgagggcagatccctgcgccagatgccacagggaactactggggaaggggaaagtcacattcctgggttttccctcgtggtgctcccattccaaagaggagacatctttactctcggaaagtcatcaggttcatagaggagacacagaggctaaagcccagagaacacaggcttggaaaagccaatggaaataaggaatggtctccatacctctatctattgcatctaaatattcaagggatgatttgggatttggagccaggagtaggggttagtcatggaaggcgtcctgaaagaggtaagcatgggacagatggtgaagaggaagaaggagccagggcttggatggaagctctagggtgatgtacaggcaggagatggagcaggtctgcccagttcccttcatgcatctgaaccaggaactagaactgacctgactagactctactgacctgaaccaggtcactagagggaaaatcagcagaaatgagcacaaggactttgaagtccttcctcagagtccagaccagggacaccactgaaggcttccagcttcttatctccctgaaggctctcagccctgaccctgcacctcccccaactcacgctcccaatatctcatacttaagatgtccagagattcacaaattctcattgtctaattctagggatccataaatcacaaggaggctgtaaccatccccaagggctgcgtcctggcctttcgagtgagacagctgatggtcaaaggcaaagatgagtggggtgagcagagacccgcatgttctccccacaagatgagaattacctgcaccagtactgaggcaccctggtcccctcttgcggaaatgtcagagaatgagtaggggggtgtattgtactgtgatccgactgcagccatggagcctgctctggagagaagggtgaagaggctcctggattctgagcatcttctgggtgctgggcactgtggttattgggggagggggtacaaatatgaacatgcactgcctctgctctcaagaagtctgtggccaaaggaggaaacagacagagactggaatggatgatagaaagtagtgttctcatagtagagaatttatcaaggaagaaaagattgcttccagcaatggaggttgaagctgggaattaaatgaagcatttggggtgcaaggtcctagcccttagcagagccctttggcttgagactgaagaagggaatgtggggcagctgctaagtgtcctcccaccctccctcccttgcccttcacagatattccacatatctgcaatgataacatgcaaaccttccctcctggaggtaagtgaaattgcttacgggcttcccacatcttccgccctacccctgacattatctgccaaaatcctccaccctctcctagcttatactataatcccccaaggagcctctgcttttgtttcccaagtccctaagaatacctagcctcaactttagaaagacagatagaggcatataaatactgtcccagagagatatagaaactgacagacagagaccggaaggcacagtcagaagcagaagtaagacttggagactgagtgtgttcccgaatcatgggggtggatgagctagcataatctccctgtgtttttataatgatcactgatgaaactgccttgaagactgttttagatgaaaaggcaaaaatgggttttgtgctgacagatgtgcattttttctgtcttcagaaaagtcaggagaggagaaggtcatccgtaagtgtttcctttcattccactgaaactttcttgactccaaattttaaaactccagtctttttctttccttctgacaggactgacagggaaatagcagagcgaatctcagcaaataattgtccccgaaacatggcagaaattccaatagcttgggaaaaagcagtggaaaggggggagtctttgcccaggtggtctgacgcctgagacctttgtcctcaacagccttactagcagccaggcacagtgattcacacctataatcccagcactttgggaggctgaggcaggaggatcccttgagctcaggagttcaagaccagcctgggcaacatagtgagacaatgtctctatttaaaaaaaaaaatttttttttggatggagtttcactcttgttgcccaggctggagtgtagtggcgcaatctcagtccactgcaacctccacctccccggttcaagtgattctcctgcctcagcctccggagtagctgggattacaggcacccgccaccatgccctgctaattttttgtatttttagtagagatggggtttcaccatgttggtcaggcaggtcttgaactcctgacctcaggtgatccacccacctcagcctcccaaagtattgggattacaggcgtgagccacggcgcctggccttttttttttttcttgagacagagtctcattctgttgcccagactggagtgcaaaggtgagatctccactcactgcaaactctgcctcccaggttcaagcaattcttgtgcctcagcctcctgagtagctaggataacaggcgcgggccaccacactcggcgaatttttagtatagatggggtttcaccatgttggccaggctggtctcaaactcctgacctcaggtgatcctcccaccttggcctcccaaagtgctgggatcacaggtgtgagccactgagcctggcctagaaaaaaaaaaaaaaaattaagagtcttagtagctataacctgctacacacacatctgcaactcggccgcccagcaactggggccagagccactgagtcacagtaatgccaggaacaaggtagctgggctctcccaggagacaggcaggatgtatttcctcatcttccttagtgtctcaacccctgggtatggctgccattctgaaggattgcattcttatcttttttttttcctttttttctcagttatccaggcatctgatgttggtaaggaactttgtgagtttctcccaagactttggcatggaggtagcattaggggcagagagaggagaaggcgaagtcattctttgtcagctaactcatgggaagggaaaacagactttctttctccactttttgctggagtctcaaagaaaagtcaagtgtgtactgatatgggataaggcctgggatctcaggaagattaactgttgggttagatgatacatgcatcctggcccaccttctcgccccaaccctcaggttagggttggtggatagttctgtcaccgcattccttggtaaagaaaaatggggccaggctcaaactggggggtagagcatgggtacctaaagggggctgagtgtaggagccctgcagggggaatgctgactggagaggaaggtgcccgatggagggctgtgtgtcccattattgtccccataggggacgtacacgaaggcttcaggacactaaaagaagaagttcagagagagacccaacaagtggagaagctgagccgagtagggcaaagctccctgctcagctccctcagcaaacttctagggaagaaaaaggagctacaagaccttgagctcgcagtgaggacctagtggaagtggggaagggtgggagaaggcatgttttggtgaagatttggtgggggcgggtattgcagcaggtagggagatctgacgggggcaggaggtgggtggccaggggagtccaccttagataccttccccaaggctggccacgtgccccaaggctgccaggccactgctcctccctttgtcccctggaaaagggcaaacagtgggttcccccaaggcacatgctccctctgatggccagaagggacttctgctggaggggctggaaccttctctttccagagtccaaaactcaggaaacaaggaacccaggagtccagtactcttcaggacatgaggcctcgaaaaagaaatcaggaaatggagagagtttccgcatgtcaaggggttattatgtgctgggccctgggttgggccctttcctatgttatcttcaatagtcgcccaccttcccccacagcttgaaggggctctagacaagggacatgaagtgaccctggaggcactcccaaaagatgtcctgctatcaaaggaggccgtgggcgccatcctctatttcgttggagccctaacaggtaagtggggaataaggtcttcatttatagaccttttcagtaataggaatgaatcacttgaatcaattcccaaatggatgaataaatgaatgaatgacaaattataccacagttaagtagtttatatctacatttttataaattggtttcatggctggctgcagtggctcatgcctgtaatcccagcactttgggaggccaaggtggatggatcacccgtgatcaagagttcgagatcagcctggccaacatggtgaaaccccgcctcttccaaaaatagaaaaattagccgggcgtggtggcaggtgcctgtaatcccagctactctgaaggctaaggcaggagaatcgcttgaacccaggagggggagggtgcagtgagccgagatcactccattgcactccagcctgggcaacagagcgagactccatcaaaaaaaaaaaaaattggtttcattcctaaggatttgcttggtcacattgggtagtctgagaagacagcctagtcttgctaatagaggttgaataaccctagttttatcagcaacatatttaaaatttctgcatatagctaagctcatcacttctatcctgatacctgttagctttaacttcagggagtaacattttcttatcttgcccctaagagctcttcttccctccacattttctagttttccacttagaaaaactctgtggtccttcaggtgtaagccaaaacgtttgttcccttaggaagcctgccctccgactccaagaccaaagtggacccctcagctatggctcccttaacacctgcgttgtaattacatccaatgaatgaaggctgaaattctggaagtgcgctatttggaggctgtagtcccctctgcaccagcaacacacatctttctctgctttttttctccagagctaagtgaagcccaacagaagctgctggtgaaatccatggagaaaaagatcctacccgtgcagctaaagctggtgagggaaaaacagcagatgctggggagagtctgggagtagctgcagccagtggagatgcagatttcgcctaaggatggagccattctggaggatccctgtcttatcccaggggcttatgcccactcctcctttctctctctatttctcattttttgttatttcacaagaggtagaagactgaatttctgggcaataatctgggtttattagcctgatcttgggagaagagacagaaactgtggctttgcttattcctagccaaatattgtaagcaaatttttttttttttttttttgagatagagtttcactctttttgcccaggctggagtgcaatggtgcgatcttggctcaccacaacctccgcctcccgggttcaagcgattctcctgcctcagcctcccgagtagctgggattacaggcgcccaccaccacaccctgctaattttgtatttttagtagagacagggtttcaccatgttggccaggctggtctcaaactcctgacctcaggtgatctgcccacctcagcctcccaaagtgctgggattacaggtgtgagccacctcgcctggcctgtgagcaaattttttactgtgtctgagtctgtctcaatttattcctctgtaaaatggggctaaaaatcaatgtgctgcccactgtatagggctgttcaaagacccagatggggttgtaatgtaaggtaaagtaaggaattctaataaggggaatgtaaccttcttgtgatttttgtgagttaggagaggagagaggtttccagttctttcttttcatgctgttttgattccctccaggtggagagcacgatggaacagaacttcctgctggataaagagggtgttttccccctgcaacctgagctgctctcctcccttggggacgaggagctgaccctcacggaggctctagtcgggctgagtggcctggaagtgcagagatcgggcccccaatatatgtgggacccagacaccctccctcgcctctgtgctctttatgcaggcctctctctccttcagcagcttaccaaggcctcctaatttgccttttacgtctgcttcatgactccctaatgccttcccaacctcgtggtgctgtgtccttaccacctaagggcatttcagagccatcagctgaagacatctgaaatctcagctggtcacccatgataaccaacttccacctgcccaaccatatatcaccccctacccctccagctccgcaacccactaagcccatctgctgatgcttaaattttctttacttttcttttctttttttttttttttttgagatggaggctcactctgtcacccaggctggagtgcagtggcttgatcttggctcactgcaacctccgcctcccaggttcaagcaattctcctgcctcagcctctcgagcagctggaattacaggcacgtgccacgacacccagctaatttttgtatttttagtagagacggggtttcaccatgttgcccaggttggtctcgaactcctggcctcaagtgatctgcccgcctcggcctcccaaagtgctgggattacaggcgtgagccaccgtgcccggcctgtgcttaaatattctaggagtagaagcactcagacttttaaaactatgagccgtttcagcaaaactgagaaaaaaagaagattaattaatttcctatcctaatccctcctacttatacttccccaaaaaacaagctttactggaattaatggaaaatattatgtcaatcttaggaatgatatgtcttttggtgtttttctttaaagaatttatcatacagaaattcttaatttgtgccagaaaaagaaattgttatcatactgcatataaatcatatgtacatgaatatgatgctgtactgtcctcaggcaaactggaaaatgctcagagggtatagaatgtggaatccagatttttttttctgttcaattagttttctttaatggaatctagagtctcaagtgagaagatatcaaagcagtttgtcttcaaagaagagcatttgggagtcccctagctctgggttgagggaaagaccgagagatatatagtagaagcccgaaacaaaaataagacagatttcaaatttattgaacagaaaatgcagatgggcctttaaaaaaaagggggacccaagaataagactaacccaaaactttaaaaactaaattgtgatattatttcacctttctctgttctgccctgaaatttagggttcttgtaggaggaagtagtgtgggtaggcttggcatattactactaatatggatattacaatctcatcaaaccgctgggtttatatcatcctcctctgcctaaaagctgggtttgaacatctttcaccaacctcttttaaagcagtatcaggaccggacaccgtagctcacgcctgtaatcccagcactttgggaggctaatgtgggcagatcgcttgaatccaggagttcaagaccagcctgggcaacagggcgaaaccctatctctacaaaatataccaaaaattagccaggcatggtggcatgtgtctgtggtcccagctactcgggaggctgaggttagaggatcacttgagcctgggaggctgaggctgcagttagccaagatagcaccactgcactccagcttgggtgatggagcgagatcctgtctcaaaaaataaaaataatttttaaaaaagtagttctatgagtgcagtacatgtctgtaatcccagcactttgcaaggccgaggcaggaggatcacctgaggtcaggagttcaagaccagcctaatcaacatagtgaagccctgtctctactaaaaattaaaaaaaaaaaaattaaaaattagctggacatggtggctcgcacctgtagtcccagctactcaggagaaggaggcaggagaatcgcttgaaccccagagggggaggttgcagtgagccaagatcacgacactgtactccctagcctggccaacagaacgagattccgtttaaaaaaaaaaaaaagttttatgagtggaagaatttctctaaggattttggtccgtggagtcagactctcccccagtgtcttagtcaccccctgcccagcctggttccctcatccaccaagaattcatgaccaactgccagaagctttgtgttatgccgccagcctccctgatcctgagcaccttccaaagcctcactctattgctcatggatatactgggttgttatctgctgacttggttgttttctccttgtgatgtaaacttaatagagagatgagctaacaccctaactatctagaagagtaactcctttgattgttaaggatgaacataactcatctgttttcttccttaccattctcgcccaccttcagttgcagatatggtgttatgaagaggttctaatgagtttattccaatgatgattcaaaagtcctgttatccaccccccagccctggagggtgagaggacagttgaggaggaactggtcaaggcatgttccctaaaactagagcacatatctttccagttagcgagtggctgtttaacgcaaggaacatcctgcaatcctatgaaagaggatgcaaaagatatgcaggataccctttatatatgcaaaggaggaggtcaaaacatatttcctgccttctaggtccttacaacagggctagattgtcttgtagggtccgtgaaaggtctaaaactcaggacttccacttatgggagagagaaaagtttcaaggtagggagagagtttttgttgtgtgttctaagaaattgggagctatatccttcaccttgtttcaccttccctgcagaaccagtggggcagtcctttgaaaaataagtgggtagggtttcttgtccaatttgcttccccttaggtacaccactaagtaaaccatcattctctccttaggcacaccattattctgttccccatttcacaatgtctgtctggatgtataaaagccctctcaatgggctccctaaagcgtctgccagtaggggctcccaccctctttcctcaacactcccaatccaccgcagcccagagcacagtgtctgcttatctaaccatctgactcccccgtatactacattcttgagctgtttttcacccccctatttgctaaccgtgggccgtacatagggtggacccctatattttgttaaactggagtgattctacgcaaatgcacgctcctacctatcggcactcccagcctgcagaaattgtatgccttatgttcagcactaaactcaaatctaaccaaggaagtccggatcccatagggttcttcctactctccagttcggtttattttaaggccaacagccctagcttcacgtccctccttcacagccttctttccttccctcctgccggatgcgcccggcagccgttgagcacaagcccagcggatctggaaggagaccccgccgcgaccggggaaaattgagcgaacttgggcgcaaaacccgcccggcaactcgtgacgtcatctcgtcccgcgctcggataggctgtacccactccacgctggttgaggcgctcttaaagtcctttgtaacccagattggagcctgaggggacctctcgtggacgcccacagaaatgcactcgagaggaacataaaagcatcacacttaagcgctcgaaagaaagccccacgaacccataaaggctcctccccgctccttcctcgaagctcctccttcatcctgcacctcggctgtggatttatttcccctttgttgactcggccatcggcctgccgggcctggcgtttcccagaaggcccagcgccgggaaggggtttgcagctgctccgtcatcgtgcggcccgacgctatctcgcgctcgtgtgcaggcccggctcggctcctggtccccggtgcgagggttaacgcgaggccccggcctcggtccccggactaggccgtgaccccgggtgccatgaagcaggagggctcggcgcggcgccgcggcgcggacaaggcgaaaccgccgcccggcggaggagaacaagaacccccaccgccgccggccccccaggatgtggagatgaaagaggaggcagcgacgggtggcgggtcgacgggggaggcagacggcaagacggcggcggcagcggctgagcactcccagcgagagctggacacagtcaccttggagggtacggcagcccaggccgggaacgtgccgcgatcgcgggtgacagcgacccctgtgatttggcttcttgctgggaagccacagcagcctccaccaccctcagttctttgggatcacccccagatacctgctcccactgccccgacactcccgactccaggcccaatgactgaaccttctctccaggctgggaaccactcccctcccatcccctccatccccatatctggggttgcatctatatctaggtcccagtgggcctggggactccctcttttaagtcctcccctctgacctattccgtttatatcccacccgactgattttagcgcctccaatatatgactgattgttcccgctggaaaccagtgtttgtgtctgtgtgtaaacagggccaggatgacctagaatattgactcctgagttttaaaactgtacagcagatttttgttgtcctagctgcctttagcacactcccccgaatgaaccatttcgacctagtatcttgtttcctacttctctaactgaagtgtcccaacagtccccttgctgtctcctcccttcaggtccttactgcccctctgtttctaaagggtttaagtacatacacacttaaaacttttcgggtgtcatctttgtttggttttgtaatactcaacctttggcctaaactcctatataccggtgtctcctatttcttttctccgaggttcctgtttcgagtgtctgtagtcctcttgttcctccaagttcatgttttacttttcccacttacagcgtcctgtttccatttgaagtgggcaaagtgagagcttcccactgtgatcctggtgccattttcctggttctggatcaagtgggaccagactacttactaggttttcttttcactaaaatgcgtgagaaactagctcaaaaacattgagataagcaaagttatcctcctaggtggtgcttttgaggatgtgatggtgttgactacatcagctcttactgtaaagttgagcaacaggatcgatatttaatagagatccttttacctaaagtagtggcagcaatgtcaaaggtgccactcagcattgcctactgggtgtgtttattacaggcacttcattttcttcttgtaaagtaattcatattcattgcagaaattgtggaatgtatgagaagttaaaagcaggggataaaaaacatggttaacattttttcttgtgaatttttgagctgttctcctataattgagagcaagttatgtatacagtttgtatcaaggcataactaaatataaattttgaattttatgtgttttcattaacattcgtaaacataatcagcattcaatttattccagaaacatttattgaatacccaatataatggttaagagtacaagttctggaattagttccctcatctgtataaatacaagtaatagtacagtactttattgggttgttgtgaacattaaaatgcttaaaactgtgcctagcacataaatatcagctgttattatttatatcattagtgtggcccagataccctgtgctaatcggtgaatatacagaagtgcctaagaaactactcattgattgcattcccttattgctttgcatttaaactgtttctagtttcttgctatcataaatagctttgaagcaatcatctttgtgcccaacttaaaaaatctacttttctaattatttcttcagtacagattcccaccaaaacctatatgcctgagtttaaaaggctgaacattttaaaggtttttgatagttattgtccagaaaaactgtgctgatttacattataccaggagaaatgtagttttcactgtactctataatttttttttttttttgagacggagtctcgctctgttgcccaggctggagtgcaatggcgcgatctcggctcactgcaacctctgcctcccaagttcaagcgattctcctgcctcagcttcccgagtagctgggattacggtcacccaccaccacgcccggctaatttttttatttttagtagagactgggtttcaccatgttggccaggctggtctccaactgctacccttaatgatccgccctcctcagcctcccaaagtactgggattacaggcgtgagccactgtgccccacctataatttttttaatgttacaaatttggtagtttaaaaatgtttccatttgcaattactcaaatactaatggaatataatttttgtctgttagctatttttcctctttgtatgttagttcgtctccatttttgttttgaaattgtggcaatataatcattataccattatatctcttaaccatttatacaagctctttatagaataaaaatatgaatctttgatcacatttgttgaaaatatttttcttttgtatacacagttatctaaaagggtttttttaaatgaagtcaagcccattaatcttttgtgcgtatgtgatttctcccattgttcacatttagaaagtcttttccattaagatctgataaatctggactccaggtttctgtagttaattggtttttcttttcttcctctgtcatcctctaccccatcctgcacccccactgtatgtttttcttgccacttggttatgtcttaaaatcagtgtgtggaatctgtaaatattatggaccccattagggcagaaaaggtgagtggtcgcattttgcccctctgtgagaggctccttagaactccttgcctggccggcacggtggctcacgcctataatcccagcactttgggaggccaaggcgggcagatcacgaggtcaggagatcgagaccatcctggctaacacggtgaaaccccgtctctactaaaaatacaaaaaatttagccaggcgtggtggcgggtgcctgtagtcccagctactcgggaggctgaggcaggagaatggtgtgaacccagcaggcagagcttgcagtgagccgagatcacaccactgcactccggcctgggcgacagagtgagactccgtctcaaaaaaaaaaaaaaaaaaaaaaagaactccttgcctggagtggtgggggactaggagtgaaagtgacatcattttcttctctgctcttcttcagacatcaaggagcacgtgaaacagctagagaaagcggtttcaggcaaggagccgagattcgtgctgcgggccctgcggatgctgccttccacatcacgccgcctcaaccactatgttctgtataaggctgtgcagggcttcttcacttcaaataatgccactcgagactttttgctccccttcctggaagaggtgagtgagtcaggccaacttaaagggtgcaggcctggcctcagatccccaggaacagcattgttttccatcctaaagtcccatcttattacctgtggtagcatgaggagagaagccaaagcagtccatttgaatactcatctgcacagtgacaagggaaccgtccactgccctgtagtgtcattcttcaaagtcaggggatcaggaccctcccagccaaactcatttcccactaccctgcaacctgtaccccctactccagttgaggttgcgttgggtgacctctctgttgttctaggagagagaaggtgctgctgcctctttcttctgaagcttcaccatggaggaggtagagaacagtggttaggaggagcacagctgtcagggccaggcacagtggctcacacctgtcttcccagcactttgggaggctgaggcgggcacagtggctaacatcgtcatcccagcactttgggaggctgaggcgagcagatcgtttgagtccagcctggattcaaacaatctgcccgcccaggagtttgagaccagcctgggcgacatggtgagaccctgtctctgcaaaaagtacaaaaattagccaggcatggtggcacctgcctgtagtcccagctactcgggaggctgaggcaggaggatcacttgaatgcaggaggtggagattgcagtgaaccaagattgcaccactgcactctagcctaggtgacagggtgacccccctacctcaaaacaaaacaaaaaaaaccccacagattttagaggtagagttgaatttgaatccaaaccctgacagttagtacctgtgggacttgggcgagtgacttcattttgctgtgcctcgttttcttcatttgttaaacgtgatgaacggattgggaagcgggcagtataaagctcctagagcagtgcctggtacgtagtgaatgcagacgaagtcagtttggtggtggtggtggcgcctccgtgccaggagagacctctccttatcctctgtagctgtaaactctccctcatgattcatggcatgggccaggtctcagccttctccaattccactgaccttccagcacctgcatttccttaaaatcctgtatactcagtcagctccgtggatggggaaactcagaacatccctggaggcagggcagtgaagagtttcttgtctgggaaaggggaaaagcgtactgttcccccaactccaccttgaatattttctgaccttcacatcgctaaactcacgaaacgtgattattttgggggtgactgtaacacattattttttccagtgtcagtgacaacataggaaaatatgttttgtttatatgttgactttccctaaattttctttgttcccacaagaaaccattttttggtctcattattctgatttcatctctagaattatttcgttcagccctgtccagtagtatttgcagtggatccaggtgtggtggtttaatgtctccacttaggttgtagcctctttgaaggttccttacatcgtcctttgtctccattatgttgtgtaaagaaattttttgttctcctgtaacactttattgtgtttattaatattatattgccagcctccttgacttgttttgtttttttgagatggggtcttgctctgtcacccaggctgaagcacggtggcacacttatggcccagtgcaggctcagactcctggtatcaagcagtcctcctgcctcagcctcctgagtagctgggaatacaggtgcatgccaccatgcctggctagttcttttttattttttgagagatggggtctcactgtgttgcccagactggtctcaaattcctggcctcaagcattctcctgcctcagccttccaggtagctggcactaccggcgtgagccaccacacccagctcctccttgatttctttgggaaagactgtaatctttatttttttatccctagcacctaacaaaatcttggcacatggtagacactcaataaatatgttgaaatacatagtggatgctcaataaattcttggttacttgatcagactgagcttttccatggtaacttctgtcctctcctagcccatggacacagaggctgatttacagttccgtccccgcacgggaaaagctgcgtcgacacccctcctgcctgaagtggaagcctatctccaactcctcgtggtcatcttcatgatgaacagcaagcgctacaaagaggtatccaggatgcagtgagagcgattcataagccccaagtgatgcaaggggtttggcggggagatggtccctggtgaagaaatggaaataatcattgattcttaagaactgtcccccacactctttccccatagaggtatgcgtttgatcccacatcccaggagaacccactcttgctctgggcactgtgggacagggcttgcagtggtcatgctgtaccggtctgtgggggataccagcgtagtacattcttggggaaaagtaggggcatttggagacagaaagacctgggttccaatcccagccataccctaggcaaattaatttctcccagctatatgtaagatggggataatagtgcctaccttacaagatggttagcgttacataaaataatttgtttagaaatacttagcgcaatgatctgcatatagtaagctttcgtgatattttcataaatggtagctgttattatggactaatagctccatttgcaaactgcacttctaccactcccccagctagggccagcttctttgttcatcatagccactgtcacaggagcacactcaggaagtaagtcgcactccttaattccctggtttgtttcctttccttaccacactatttttggttgttgtttggttgggggtttttttgagattgggtcttgctttgttgcccatgctggagggcagtggtgtgatcacagttcacttgacctccccggcttaagtgatccttccacctcagcttcttgggtagctgggactacaggcatgtgccaccacgcccagctaatctttgcattttttttgtagagacaggatttcaccttcttgccaagctggtctccaacccctgggctcaagtgatttcctgggctcagcctcccaaagtgttagggttacaggcatgagccactgcgcctggcccactgttttgtttttactggagatggggtcttgctatgttaaccaagctggtcttgaactcctgggctcaggtagtcctcccgcctcagcctctcatgtagctgggattacaggcacgtgccactgtacttggctgtttgtttttgagatataattcacccctttaaagtgtactacaggccaggtatggtggctcacgcctgtaatcccagcaccttgggaggccaaggcaggcagatcatgaggtcagacaatcaagaccatcctggccaacatggtgaaaccctgtctttactaaaaatacaaaaaattagccgggcgtggtggtgtgtgcctgtagacccagctactcagaaggctgaggcaggggaattgcttgaaccagggaggcggaggttgtggtgagccgggattgtgccactgcactccagcctggtgacagagcgagactccgtcaaacaaataaataaagtatactacaattgagtgggttttagtatattcccaaagttgtatatccacccctaattccagaacattttcatcaccccacaaagaaacaccatacgtattagtagtcacttttcattttccccttacccagcccctggccgctactaatctgccctgtctctattgaggatttacttactctggacatttcatgtaaatggaattacacaccgtgtgcccttggtttctggcttttttcacttagcatcatgttttcaaggttgacccatgttgtagtgtgtgtcagtacttccttcctttttaaggctgagtaatattccctcgtgtggatgtgccacattttgtttatctgttcatcagctgacgggcacctgggttgtttctactctttggttatgaataatgcttctgtgaacattcgtgtacatgcttttatgtgagcctaagtttccagttctcttggcttgcatacctaggataggaattgctggctcaaatgacaactccatgtttatccttttgaggaactgccacttgattctcttttggcttcctccccaggcacagaagatctctgatgatctgatgcagaagatcagtactcagaaccgccgggccctagaccttgtagccgcaaagtgttactattatcacgcccgggtctatgagttcctggacaagctggatgtggtgcgcaggtacaggcagccaagcatctcacttggggtccgtggggtcagagacttggtcagtcacaagcacacagctgtggatctgcagagggcgaagaacctgtagatgtaagcagggaagaggggcagtggttcccatgccctgcgccacgtgaggggtgtgggagagagactggtgctagatgaagaagtgggtcactgctgggctgtaaagaactgtccccaggttcttcccttcaccccacatcaaggtaggactgagggtgggttaggggtggagggacaggctagaaaacattttacttctttgctcaaaacctgcagtggcttcccgtctcaaggaaagacaaagtccttacaatacctcataaggcctgacgtgatctgctccattttgacctcccagacttcacctcctcctgctcctcagccccactggcctgcctttcctctggtgtgcccggcacactcttcttcagagcctttgcactggctgcccctctgtccagaacactcttctctccgcctccttcaagccttcccttaactgatcccttctcagtgagtcctgccttggccaagctattgaaaagttcaactcatctttctcacgtcctgcattccccattgcagttcccctggcctcacaggcctcccatcttctgtcacactgcaggctgtgcttctttctcatgaccattgcctcccccactgcactgcattccctaagggcagggttttgtccctttgtcgcacccagaatagtgctgtacaccttaggcactcgatagttaacagtattcagcaaataaccagaaaagcaatttgtataacttttttaaggaattgagaaagagcgaagagttaaaggcagttcagagagttgtgatttgaaggctttgacatctttctttccttcttgaagcttcttgcatgctcggctccggacagctacgcttcggcatgacgcagacgggcaggccaccctgttgaacctcctgctgcggaattacctacactacagcttgtacgaccaggctgagaagctggtgtccaagtctgtgttcccagagcaggccaacaacaatgagtgggccaggtacctctactacacaggtgagcagaggggcccaacccataaatcagaaggtgtctcaggcctgcctggtgcaaattttccaaggggtggtgcataagaggcccatttggcaccctggcttgtcggtggggagttggatgaccctactctgttgaccaactctcctctcctccactcccagggcgaatcaaagccatccagctggagtactcagaggcccggagaacgatgaccaacgcccttcgcaaggcccctcagcacacagctgtcggcttcaaacagacggtgagccacaactaccatcatccctttgcctcttttttttttttttttttaaatggtgtcttgctatgttacctgggctggtcttgaactcctgggttcaagaagtcctcccacctcagcttcccaaagtgctgggatcacaggtatgagccaccatgcctggcccctttgcctgttactcattccctaccacttcagttctcttctctatgctaggggctaggaaaggcatccttaaccttcctatccagaaggacttcaacttttattattattttttgtgtgtgtggagacaggcatatcactgttgctcaggtgagaactcctgggctcaagcaatccttcggcctctgcctccctaagtgctgagattgcaggtgcgagctgccatgtctgcaaaaggttgcttcacatctatttgtgggtgtcaatgaagcagacactacctgcacctctggcagtggatattcagagtgtttctggcagataggtttagaatattcctgattccccagcgctcctgacagtcattccaggcttggacctagattgtgttgatacaaaccccaggtttttatctagtccttcatgttcacatttggaaactgtattgtctgtggccaaggaacccagaaaatctctgcaaggctgagtggctcaagtaaacataaaacttggccacttaagagctgtcagtcagcaagtatttaagcatcaaccttggtattaggcactgtaagggataggaagggaggataataagtgatctttctttcttttctttcgttttttgttttctgagacagagtctccctctgtcactcaggctggagtgcaatggcacgatcttttctcactgcaacctctgcctcccgagttcaagtgattctcctgcctcagcttcctcagtagctgggcaggcgcctgccaccacatccaactaatttttttgtttgtttttttggttcttttttttgaaacggagtcttgctctgtctcccaggctggagacagaggtgccatcttggctcactgcaacccctgtctttggggttcaagggattctcctgcctcagcctcccgagtaactgggattacaggcgcctgccaccacgcccagctaattttttgtatttttagtagagatggggtttcaccatgttggccaggctggtctcgaactcctgacctcaagtgatccacccacctcagcctcccaaagtcctgggattacaggcgtgagccaccgctccaggccaggtatttcttattattagagtatttcaaagagataaagaatgttgtgtcagaaagcttgagggtgtatgtgaagtcacagagcccagtagccaggatgtagacccagtcttcccaaattcaaacctctgctcctaccttcacacaacatccacctccatggtgtcttgacagggaacgggagacgtgtgttgattaggtcaatgtagtaggagattcattttatttctgttcagaagttcagagaaagtcagatttgtttttgatcaaataatgaaagagaaagggtcttaaagaaaaagttggctaggtacagggctcacacctgtaatcctagcactttgggaggctgtggcaagaggattgcttgagaccaacctgagcaacatatggagacaccgcctctgcaaaaattaaaaacctagctgggcgtgatggcatgcacctgtagtcccagctacttgggaggctgaggtgcaaggatcacttgggcccaggaagtcgaggctgcagtgagccatgatcgtgccactgcactgcagcctgggcgacagagcaagactctgtctcaaaaaaaaacaaacattaaaattgaactggtctttgaaagatgggtaggattttcacaaggagtaaaggcttttcagacacacagggtgcgtgagcaaaatgttagattgcttacaatatgagagacactaaagtttcttttgaaaatcactaaaaatactagtaattaacatatataaaatgtgtcatgtaccatgagagaggctttcaggcatttaaatctcagtggcaggaaggcgtagagagctggaagagaggtctcgggctgttggtgagggagcgcagggagagagagggcgggagtgaaggcatgtttgggagaaggcctgcaaccagccctctgccctctgccctcacacacctttgccgtacccctgtcaccacccagcttacagaatcacctggggctctgatgaagctgtagattccgattcagagagtctgtgttcctaacaggccttgggtgatgccagtgctgctggtggcacagagcgctctgaggagggcggtgctggctcatcctgttcaaagcggaggtcagctagcattcattcctgcagccaccttgtctcttgtaaacttgaatgtctctctccgcccattttcaccctccctgtctttacttaacaccagcttcactacctgtgttttccatcacactccttcctctctcttctagccttggcccatcacctgtttgcttcagtctccgggaagaaaacccccagccctgctgcttcctctctcaggcggccgttcctgtctcccctggctccctccccaacagtgcactggccagccccttccctccagtgttctctctgctccttctcaccacctgggcctcagcagagcactctgagagcttctctgtcgatagtaaaaccctcattctctccttgagtgaccttgtttgctttcccagcttcagcgctcgcctgcatgatgctcttcagcctgtacattactaactccgttactctgctggcactgccaccgcaaggtcccacagacttggcggcttaaacaaccgaaattgatttcatcacaattctggaggctctaagtccaacagcaaagtgtgacacgattggtttcttctgagggcctctctcgtctgcttgtcgatggccgtctcctggtgttttcacatggtcttccctctgtgcgtgtctgtgtcctgcttttgtcttagaaggacaatagtcatgtaggattagggtccacccatatgacctcactttaccataattacctctttaaaggccctgtgtccaaatagagtcccattctgaggtactggggtttaggtctctaacatgaacttgagggggatgcagtttagcccataacactaactctgacccctctcacgagcatcaggcctgcagatccagctccccctcccactccccatgtctctctctacagcgtgtcccaaagagatccctcctggcccccttaccattccttcctcctgctttcccgatccagatcagggccttgggatcatctctgactctcccccatcctccttcccatcacttggtcgtctgttgaattgtctgcacatcttctgtgtttgcctgttccttcatattgccagtgccatggtttgagccactaacattcccagacacttctgcctggtcatcttcctctccagcagcccagcttacattcacttgccttactaagcagagctccagctctgtccttcccttgcctgggaagcttccattgctccccactgctgtagggtatcataacggtcttgtgaggtagacaggctaggtattgttattgttatttggtagttttagagatgaggaactaaggacccagttgctcagtgtttcctagctagtgaatagagactagacaccaagtgttctacgtgcagactttatactgctcagcctggcacacaaaatggcaatggcatagtccccagactgcggtcccaactgtctctttcctaacagctccccaggcacccacacttttctgcctctttttcaatctgtacccttgaccctcctcctttttctgctttgtcagactccttaaggcacttcataaattaaccatttccagggatttcccctcacacatgagttattccagtggacagggcagcctcatgggtgcctgtggagggtgaagggtctgcctggccgtaggtgtgatcacacactcccgttgtaacccctgtctcctgtgacacttgctgccccacgatttagctgctttgtgttccgtgcctcctgtttgctggtgaactcctgagttggggggcgtcattccctccactgtagttcttccgcgatgctgactccacccacggtcagcaccactcggaaatacttcacagtcctgtagaggaagacaggtccaggtttccagttacccttctatgtctggatactctgctcattcactgaagccaggccccttcctgcacttatgcctctacccagataatgagttctacccactgatgacctcctctcctctagtaacagtccgcctccctaatgagcatctctggctgacacacgttccgttctccaggcctgtgagccctggtccctcgctgttgctgagccacagcacccgcccttctggcctcactttagagcactgtcatttcagagcagactacgcgcggggtggccaggtgaaatgcagctgacggctctgcgaccaaatgtgaccaaagggccacattcccagcacccggctccaaaggcagagcttggattctatgcccagcacaggttttcagggcttcctcctctctctgggcctaaacagtgatccctttccctgtttcccactacatctggcagaatttaggccacatttcattttcttcttccgcccatggggctccctgcccactgtgttcccctgtcactctgtccaggtgcacaagcttctcatcgtggtggagctgttgctgggggagatccctgaccggctgcagttccgccagccctccctcaagcgctcactcatgccctatttccttctgactcaaggtaaggctggcttccccaccccagagcccactaggcccccttcagtggggcctcttacatgcctgtgcctatttgcatcatccaatctactcctgttctgcctgcagctgtcaggacaggaaacctagccaagttcaaccaggtcctggatcagtttggggagaagtttcaagcagatgggacctacaccctaattatccggctgcggcacaacgtgattaagacaggtgtggatcaggatctgaggggctgttggaggagcagaagccaggccagggcaaacctagtgggtatccttgggcaagtgaagggtctgtgtccactctgcccaccccatcgctccttcctctcccaggtgtacgcatgatcagcctctcctattcccgaatctccttggctgacatcgcccagaagctgcagttggatagccccgaagatgcagagttcattgttgccaaggtggggctggttcaggaaccacagtgaccaggttgtcactttcctgccaatctcaggaggcaggagtgggaggagtttggccaaggaggggaataggtaaagcaatggcatagtcatttcagggcgtgcccgtcatttgcagtgaagccaagaagttgccagagagagcatggatgtgcatgtgagtgtgtgagtgtaggtgtgtgcacatgttgagtttatgatagtgcctgtgagtgtgagaatataaggagggcagaggaatgggatggaacaagatgttctctgacttagaagatgggcgtgctgggccaggcgcagtggctcatgcctgtaatcccagcactttgggaggctgacatgggcagatcacctgaggtcaggagtttgagacaagcctggccaacttggcgaaaccccatctctactgaaaatacaaaaattagccaggcctggtggcaggttcctgtaatcccagctacttgggaggctgaggcaggagaatcgcttgaacccgggaggtaaaggttgcagtgagctgagatcgcaccaccgcactctcctgcctgggtgacagagcgagactccatctcaaaaaaaaaaaaaaagaagaagctgggtgtgctggtgaactttcctctttgggggcctgcaggccatccgggatggtgtcattgaggccagcatcaaccacgagaagggctatgtccaatccaaggagatgattgacatctattccacccgagagccccagctagccttccaccagcgcatctccttctgcctagatatccacaacatgtctgtcaaggtgagaagcccgtggctgcagagtcacgcctggcagcagcacacccctccctccacactcatggattcctcagagaagactggcttaatttgtggcccacgtcccagccaatctctgtaaaatcactgagctgcagcacagggggcccagaatggggaggggacttggccatagttccatagccagttgccctctcctattgcgtttaagggatgatgtggtcaccagggaggaccaggcagggattcagagggcggggttctacatttggttccaaatttgaggcatttaacttctcaaagctctgtttctccatctctgaagctgatagggaggtgttacctgtcttgcttgcttcacagggttggtaagattaaaagaagtccctgtattgaggcacttagcgaagtctaaattgtaaaaaagatggcgctggtatctagctccacaaaagggtgagcccttatcctcagttaagcactgagtttggcgctgttactatttgcttgccatgtttttttctggtctcctccgaggaaactaggatattgctgccttgcttaaaatctggctaagccctactccacgtgacatgcaaggccctttgtgacctggtcccttaggtcaagcctcccctcccactcctgccccaccacccagcagccagcccactgggtgcaggccaggcccctcccacatggaatcctccaccgggaaggcctctccccgttgccacatccactgtgttcctccttttcctcctccctgcccagtcaagagagttggtcgtttattcctcttttttcagcatttcccacagggcactgtaataattcctttgatgcctagccccccactagactaactggagaggggcccgccgcttcctgcctggtgtctagctcacagaggggacgcagggagtgcaggttgcgtgagtgcctcacctgcttccttccctcgctcatctcctctctttgctgtgccccaggccatgaggtttcctcccaaatcgtacaacaaggacttggagtctgcagaggtaagctctctgctttctgggtgagaccgaaaggtcaaacttccacacagaaggggagtcgggcgagtgtctggaagggctgagctgctctgaagctttggcctcacttgcctctctccccaggaacggcgtgagcgagaacagcaggacttggagtttgccaaggagatggcagaagatgatgatgacagcttcccttgagctggggggctggggaggggtagggggaatggggacaggctctttcccccttgggggtcccctgcccagggcactgtccccattttcccacacacagctcatatgctgcattcgtgcagggggtgggggtgctgggagccagccaccctgacctcccccagggctcctccccagccggtgacttactgtacagcaggcaggagggtgggcaggcaacctccccgggcagggtcctggccagcagtgtgggagcaggaggggaaggatagttctgtgtactcctttagggagtgggggactagaactgggatgtcttggcttgtatgttttttgaagcttcgattatgatttttaaacaataaaaagttctccacagtgctttgtgcatcagttactatacttcactgcagtattggcaggctcagattttgggttttttggccttagagtactagccccaggtgtgtaatctgagggcgatgggtctgcagatggggaggtgcccaggggaggatgaagggaccctgacctggggtcgggggcctaggtttactctcttttcgtacttgtgtggctttggtaaggtcttgttaggaaaggtgtaccatgtgtccatcaccagctgcagaccttcatctcccaatacacctcatggtgcttcacggttattgcagtttttacaaattgaaggtttggccaggcatggtggctcatgcctgtaatcccaacactttgggaggctaaggtgggcggatcactaaaggtcaggagtttgagaccagcctggccaacatggcaaaaccccgtctctactaaaaataaaaaaatcagctgggcatggaggcaggcgcctgtaatcccagctacttgggaggctgaagcaggagaattgcttgaacccgggaggtggagcatgcagtgagccaagatctcgccactgcactccagcctgggcaacagagtgagactgtgtctcaaaagaaaaagaaaaggacaaattgaaggtttctggcaacactgcatcaagcaaatctgtcggtgccattttcccaacagcatgtgctcacttagcgtctctgggtcacattttggtaaatcctctcgatatctcaaactttttcattatatctgttatggtgatgtgtgatcggtgatctttgatgttactattgtcattgttggggcaccacaaattgcacccatataggatggtgaacttagccgggcacggtggctcgcgcttgtaatcccagcactttggcaggccgaggcaggtggatcacctgaggtcaggagttcaggaccagcttggacaacatggggaaaccccgtctctactaaaaatacaaaaaacagccgggtgtggtggcaggcgcctgtaatcccagctacttgggagactgaggcaggagaattgcttgaacccaggaggcggaggttccagtgagccaagatcgtgccattgcactccagcctgggtgacacagtgagacattgtcaaaaaaaaaaaaaagatggtgaacttaataaatgtcgagtgtgttctcactgctcacactgctcactccattccctgtctctctccctcttcttgagtctctccatgccctgagacacaaaataatattgaaattaggcctgttagtaaccctacaatggcctcttaagtgttccagtgagagaaagagtcattggccaggcctggtgactcacgcctgttatcccagcactttgggaggccaaggctggtggaccccttgagctcaggagttggagatcagcctgggcaacacaatgaaaccttatcgctacaaaaaatataaaaattagctgggcatgtggcacgcacctgtagtcccagctactaggaagcctgaggtggaaggagcccttgagcctgggaggtgaaggcagaggctgcagtgacctgagatcctgccactgcactcccacctgggcgacagtgagaccctgtctcaaaacaagaaaacagaaaaagggagaaagaatcacacatctctcactttcaatcaaaaggtcaaaatgattatgcttagtgaggaaggcatgttgaaagctgagagaggccaaaagtcaggtctcctgcaccaaacaggtagccaagttgtgaagggggagttctttaaggaaattaaaagtgctgctccaggttgggcacggtggctcacaactgtaatcccagcactttgggaggctgaggcgggcagatcacaaggtcaggagttcgagaccagcctggccagcatggtgaaaccccgtctctactacaaatacaaaaactagccaggcatggcagtgggcgcctgtaatcccagctactcgggaggctgagataggagaatccttgaaaccggaaggcagaggttgcagtgagccgagatcacaccactgcacttcagcctgggtaacaaaagcgaaactctgtctcaaaaaaaatgttttaaaaagagttcgagaccagcctggccaacatggcaagaccccatctctactaaaaatacaaaaaattagctgggcgtggtggtgcatgcctgtactccgaactacttaggacgctgaggcaggagaatcgcttgaagtggggaggcggaggttaccatgagtcaagatcgcaccactgcactccaacctgggtgacagagcgaaattctgtctcaaaacaataaaaaataaaaatgataaattaaattaaaagtgctgctctagtggacacacaaatgatatgaaagcagaatagcattattgctgatacggagaaagtttgagtctggaaagaagatcaaatcagccacaacattcctttaagccaaagcctagtccggagaaaggccctcactctcttcaatcctttgaaggcagagagaggtgagaaagttgcagaagaaaagtcagaagctaacagaggttgttttgtgaggttgaaagaaagaagccgtctctgtaacataaaagtgcaaagtgaagcagcaagtgctgatggagaagctgcagtaagttatccatcagatctagctgatctcactgacgaaggtggctacactcaaaaacagactttcaatgtagacaaacagccttctattggaagaagatgccacctgggactttcatagctacagaagagaagtcaatccctggcttcaaagcttcgaaggacaggctgactctcgttagggctaatgcagctggcgactttaagttgaagccaatgctcatttaccattccgaaaatcccagggctcttaagaatgatgctaaatctattctgcctgtgctctgtggatggaacaacaaagcctggatgacagcccatctgttcccagcatggtttaccgaacattttaagccactgttgagaccaactccttcgtcggctctgtcggccaggctggagtgccgtggcatgatctcagctcactgcaacctctgcttctaggttcaagcgattctcctgcctcagcctcctgagtagctgggattacaggcatgagccaccgcactcagccaaaaaaaatattttttaaagttattactgctgattgacgatgcacctgattacccaagggctctgatggagggataccagggaaataatattgttttcattcctgctaacacatccattctgcagcccatggatgaagaagtaatttcaactttcaagtcttttttaagaaatacattttgtaaggctagagctgccatagtgattccgctgatggatctgggtaaactgaaaacttagaaagcattcatcattctagatgccattaagaatattcatgattagggccggacgtggtggctcatgcctataatcccagcactttgggaggctgaggcaggtggataaactgaggtcaggagtttgagaccaagctggccaacatggtgaaactccatctccactaaaaataaataaataaataaataaataaataaataaataaataaatacaaaacttagtcaggtatggtggcacgcacctgtagtcccagctactcgggaggctgagacatgagaatcgcttgaatccgggaggcagaggttgcagtgagccgagatcgtgccaatgcacttcagcctgggtgacagagtgagactctctcaaaaaacaaaaaaagaatattcatgattaggccgggagtggtggctgacacctataattccagcactttgggaggctgaggcaagaagatcgcttgagcccaggaggccaagagcagcctgaataacaaagtgagaacccatctgtattaaaaaaatttaaaaattaggccgagtgcagcggctcacacctgtaactccagcactttgggaggatgaagcgggtggatcacttgaggacaggagttcgagaccagcctgaccaacatggtgaaaccacatctctactaaaaatacaaaattagccgggcatggtggcgctttcctgtaaccccagctatttgggaggctgaggcaggagaatcgcttgaacccgggaggcggaggttgcagtgagccgagatcatgccattgcactccagcctgggtgacaaaagcaaggctccatctcaaaaaattaacattagcaggagtttgaaagaagttgattacaaccttcatgggtgactttgaggggctgaagacacacttcagtggaggaaaaaactgcagatgtagaaatagcaaaagaactagaattagaagtggaccctgaggccaggcccactggctcacacctgcaatcccagcaatttgggaggccagggcaggaggataacttgagctcagaagttccaaaccaacctgggtaacatagcaagacctcgtctctacaaaaaaaaaaaaaaaaaaaaaaaaagtggagcctgaagatgggactgaattgctgccatctcatgataacatttgaacagatgagttgcttctatggatgagcaaggaaagtggtttcttgagatggaatctactcccggtgaagaggctgtgaacattgctgaaatggcaacaaagatttaggatattacatatacttagttgataaagcagcagcagtttgagaggattgactccatttctttctttctttttttttttttttgagatggagtcttgctctgtcgcccaggctggagtgcagtgcagtggcatgatcttggctcactgcaacctccacctcctgggtccaagaggttctcccacctcagcctccccagtagctgggactacaggtgcacgccaccacgcccagttaatttttttctatttttggaagagatggggtttcaccatgttggccaggctggtctcgaactcctgacctcaggtgatccacccgcctcagcctcccaaagtgctgtgattacaggcgtgagccaccgctccaggccagcattgacttcaattttgaaagaagttctactgtgggtagaacgatgtcaaacagcatcatatgctatagagaaacctttctagaaatggagagtcggccgggcatggtggctcacacctgtaatgccagcactttgggaggccgaggcgggcagatcacctgaggtcaggagttcgagaccaacctggccaacatggtgaaatctcgtccctactaaaaatacaaaaatgagacgggcatggtggtgggagcctgtaatcccagcttcttgggaggctgaggcaggaaaattgcttgaatctgggaggcggagcttgcagtgagccgggatcgtgccactgcactccagcctgggcaacagagggagaccccatctcaaaacaaaacaaaacaaacaaaaacacaaaaatgaaaaaagaaaagtcaattgatgcagaaaatttcattattttcttattttaagaaattgttttcacctgaaggcactaggaaaaataaaaacaaaaataaggaaaaaaaaaagaaattgctacagtcaccccaaacttcaccagccaccaccctgatcagtgagtggtcatcaacatgaggcaagacccttcactagcaaaaagattaggacttgctgaaggcacagatgattgttagcatttttagcaataaaggttttttgttttgttttgttttgttttttgaggcagagtcttgctctgtcacctaggctggagtgcaatggtgcattcttggctcactgcaacctctgcctccggattcaagcgattctcctgcctcagcctcctgagtagctgggactataggcgccagctaccacacccggctaatttttgtacttttagtagagacggggtttaactatgttgtccaggctggtctcgaactcctgacctcaggtgatccacccgtctcggcctcccaaagtgctgggattacaggcacgagccactgcgcccggccaattatttttaaattaaagtatgtacatatatatgtttttaaatataatgctattgcacacttaatagactacggtatagtgtaaacctaactttttttttttgagacagggtctcactctgtcatccaggctgaaatcagtggcactatcacagctcactgtagccttgacctcttcgggctcaggtagatgatcctctcacctcagcctcccaagtaactgggactataggtgagtgccaccacacccagctaattttttatttttttgtagagatggggtcttgcaatgttgcccaggctggacttgaacttctgggctcaagtgatccgtccgcctcggcctccctaagtgctgggattacaggcatgagccaccgtgcccggaccatattgtgtaaacataacttttctatgcagtgggaaaccagcacctctgtgacaccctttatcgtggtggtctggaaccgaacctgcaatatctccgaggtctgcctgtattcataatttccattaaatacaggttttggcctggccttgctctggctcctgatcatactccagccctggtcacaatatttggcatcactaccttcctttaatcttcagctgcctttcggtaaaatgaaactcctaaagttgactttgcaaaacaacacttctcctgtgtttcccaaacccgcccttcaatctctgtggcagatgttttgatcctagcgtccggattcttcatctatttttagggctccaatccttgccccattttaacctttgattttgcaaaccaatcccaaaaccttctcatagatctttgattcccttccaggaagggtgtggtgggaggactacggttaagcacctcctccgtgtccttttaggatgtgaggacaggttcaggtgggttaaatgagtcctgcagttgaacccaggctgacctgataccaagttcaatgcgccttctctcaggctgtgctgccttcttccggcctcagcttggatgtattagtcagggtcctctagagggacagaactaatacaatagttgtatatataaaggggagtttaaggagtattgactcacgcaacaggccgtctgcaagctgaggagcaaggaagccagtccgcatcccaaaacctcaaaagtagggaaggtaacagtgcagccttcagtctgtggtcaaaggtccaaacgtcccaaagctgaagaacttagagtccagcgttcaagggcaggaagcatccagcacgggagaaagatggaggccagaagactcagccagtctggtctttccatgctcttctgcctgctttttattctgcctgctctggcagctgattagattgtgctcaccccaattgaggtctacctttcccagtcctctgactcaaatattaatctcctttggcaacaccctcacagacacacccaggatcaatactttgtatccttcaatccaatcaagttgacactcaatattaaccatcactctggggttctgttatccagtcagtcttcatttgtctttgggtctccatgtagcagtccttctggcccttgacagctttccatgacttcaaaagccaacttttcttgagtgtgtgatccgaagacatacatatggcaggcacagctgcctgaagccctttccagcctgttcaatgtttgtagctgtaatgagcattcttcctgaggagcccagcctcacaagaggttataaatcttcagccttggttgtaagtgaccggagagagtttatcaccctcttccagagagctgaggtcattcgccatgattccctggttcttgcccacataaggtctatgggccatttttccgtctgctcactgtctagaggcttcttcatccactgtctggatgaaccttgttggcgtggcttctaatttcctgaagaaactcagtgtcacttttttttttttttttaaagacagagtctcattctgtcgctcaggctggagtgcagtggcacaatcttggctcactacaacctccgcctcccaggttcaagcaattatcctgcctcagcttcccaagtagctgggattacaggcacacgccaccatgcctggctaatttttttgtatttttagaagagatggcgtttcgccatgttggccaggctggtcttgaacttctgacctcaggtgatccacctgcctcggtctcacaaagtactgggattacaggcatgagccaccgcgcccagccaagtgtcactttcatgcttagaaagttcactgtattattttaccttccagctttgtttgtttgtttgtttgttttgggacggaatctcactctgtcacccaggctggagtgcagtgttgcgatttcggctcaccgcaacctctgctgccagggttcaagcgatcctcctgcctcagcctttccagtagctgggattacaggcatacaccaccacacccagctgatttttgtattttagtagagatggggtttcaccatgtgggccaggttggtctcgaactcctgacctcaagtgatccgcccgccttggcctcccaaagtgctgggattacaaacatgagccaccctgcccggctaccttccagttttgttttgttttttaatttgaaaactacatagaagtacaaagaataacataacaaatatgtacccatatattctccacccaagtttaatcatgttaacatttcattagtctgtgaagttttttaatcaaaaaagaaataaattggacaccatggttcatgcctataatctcagccctttgagaggccaatgcaggaggatcgcttgagcctagaagtttgagaccagcctgggcaacacagtaagatcccatctctacaaaataaataaataaataaaacattatggctaagctggaagtccatcttgttcccctggcaaagccagccactttaatgaattcagctggcaggcttctagtttgtttttatacttctactacataatagtattgagctgccaggtgcaatggctcacgcctgtaatcccagcactttggaaggctgaggcgggaagattgctcgagcccaggagtttgagaccagcctgggcaacatggcaaaccccctctctataaaaaacacaaaaaaggccaggagcagtggctcacgcctgtaatcccatcactttgggaggccgaggcgggtggatcacaaggtcaggagatcgagaccatcctggctaacatggtgaaaccccatctctactaaaaatattaaaaattagctgggcgtggtggcaggcgcctatagtcccagctactcaggaagctgaggcaggagaatggcgtgaacctggaaagcggagcttgcagtgagccgagatcacgccactgcattccagcctgggcaacagagtgagactcctactcaaaaaaaaagggcctggtgcagtgggtcatgcctgtaatctcagctctttgggaggccgaggtgggcagatcacatggtcaggagatcgagaccatccttgaccaacatggtgaaaccccgtctctactaaaaatacaaaaattagctgtgcctggtggcgcgtgcctgcctgtatactagctactcgggaggctgagacaggagaattgcttgaacccaagagtcagaggttgcagtgagcaaagatcttgccatagcactccagcctggcgacagagagagactccatctcaaaaaaaaaaaaaattaggcaggcacagtggtgcgcacctgcagtcccagctacttagggaggctaaggtggaaggatcccttgagccctggggggcagaggtttcagtgagccaagattgctccactgcactccagcctaagtgacagagtgggaccctgtctcaaaaaaaaacaagaataatattgagcttttattcattttattattgaattagtctgttctcacactgctataaagatacctgagacagggtaatttataaagaaaagaggcttcactggctcatggttctgcgggctgtacaggcttcttgcttctcaggaggcctcaggaaacttataatcataagaggaaggggtggaagacgaaggggaagtaatcacgtttccatggtgggagcaggagaaagacaaaaggcaaaagggaaggtgcaacacacttacctcccaccaggccccacctccaacactcagaatcacaattcaacatgagatttgggtgggcagacagagccaaaccatatcaattttatttatttatttatttatttatttttcgaggacagggtctcactctgtcatccaggctggactgcagtggggtgattacagctcactgcagcctcaacctccctggcccaagcgatcctcccacctcagcctcccaggtagctagaactacaggcttgcacaaccatgcccggcaaattttttgattttttttgtagagatggggcctccttatgtcgcccaggcttatcttaaactcctggactcacaagcaatcctcctatctcaggctccctacgtgctgggattacaggcatgaaccaccatgcccggccagtattgagtcttaaaattcttgtaactggtatattacaggaatgtaatttgctctgttttcgctcaatattgtttttagacctaatcacattgatgcccatgccaagcactgttctgggcactgagaatacaaattctcagagtcttcactctggacagctttcctctcagagtctttcctctcagagtcttcactctggacaggttgggaggcatacatagtatgaagggaccagtatctatctagctattcccatgttgatgggcattgcaaatgcatttccattggtttactataacagtgttccaaagaacatctctggccaggtgcagtggctcacggctgtaatcctaacactttttaggaggccaaggcaggaggatcacttgaggacagtagttcaagaccagcctgggcagcatagggagactgtctctacgaaaaatcaaaaaattatggccgggcatggtggctcacgtctgtaatccctgaactttgggacatcaaggcaagtggatcacttgaggtcaggagttcgagactagcctggccaacatggtgaaaccctatctctactaaaaatacaaaaattagccaggcatggtggcaggcacctgtaatcccggctactcaggaggctgaggcaggagaatcacttgaacccaggaggcggaggttgcagtgagctgagatcacaccactgcactccagcctgggtgacagagcaagactctatctcaaaaaaaaaaaaaaaatcaaaaaattagccaggcatggtagtgcacacctttagtctcagctactcaggaggctgaggtgggaggatcacttgaacctgggcagtcaaggctgcagtgagccaagatcatgccactgcactccagcctgggcaacagagagagaccctgtctctaaaaaaataataataataaagaaaaaaacagctctgtttatgtctcctggtacatacatactatgtatatagtttgcaaactcaaagatccagatagtcaattttttaggcttgtgggccgtatggtctctgtcacaatcactctgccctgtctttctagcacaaaagcagctataaacaatacatacatgaattttttatagacatcgagatttgaatttcatatgatttttacattttataaaataatctttttaaaaattttcccctaaccatttaaaagtgtaaaagccggccaggcgccgccatggctcacgcctgtaattccagcactttgggaggctgaggtgggcagatcacttgagatcaacagttcgagaccagcctggccaacatagcaaaaccccatttctactaaaaataaaaaaattagctgggcatagtggtgcacacctgtgatcccagctacttgggaggctgaggcaggagaatcgcttgaacctgggaagcggaggttgcagtgagccaacatcatgccactgcactccagcctgggtgacagagtgagacttcgtctcaacgaaaaaaaaaaagtgtaaaagccattcctaattcagtgtacatcagtgtacatactcaggtctgcgtactcctgctctgaggcatacctgagaagtagagttgcttggtcacaggacatacacatttccacattaactagacactaccaagttgccatccaaggaggttttttttttacaatctacactccccccagcaacaaatgagagttactccagatcctttacaaagatgctctaagcccagtaccagatgaaaacaggaagtgggaggggaagctgccagccccttctaaccatgaagaaatacctggtagagccttctggatgctggaaggatgaataacgggggtctctggagcctgccccctgtcagatcactgtgacttctgagcctccagtccagctcagccccatgtgtcatggccagtgataatgagccctcactctctgtttggtctttattctcccccatgtggggctgaagtctggattgagccgttattcaagatgtacagctttcttgacaggaaagtagtgtcacagaaacagcaggggcttggcaagatgatctaactgcaaatcctacctggctcagccaccagctagttctgtgatcttgaacaagttttttcacttctctgaggccatcccttggctacaacacaccagttggttgacaggatgaaatgacgaaagtgccttacacctgtaatcccagcactttgggaggccaaggcgggtggatggcttgagcctgagaggtgacagcatgccggcagtcctcacagccctcgttcgctctcggcgcctcctctgcctgggctcccacttcggtggcacttgaggagcccttcagcccaccgctgcactgtgggagcccctttctgggctggccaaggccagagccggctccctcagcttgcagggaggtgtggagggagaggctcaagcaggaaccggggctgcgcgcggcgcttgcgggccagctggagttccgggtgggcgtgggcttggcgggccccgcactcggagcagcgggccagccctgccaggccccgggcaatgagaggcttagcacccgggccagcggctgcggagggtgtactgggtgccccagcagtgccagcccgccggcgctgtgctcgctcgatttctcactgggccttagcagccttcccgcggggcagggctcgggacctgcagcccgccatgcctgagcctcccctccatgggctcctgtgcggcccgagcctccccgacgagcaccaccccctgctccacagcgcccagtcccatcgaccacgcaagggctgagaagtgcgggcgcacggcaccgggactggcaggcagctacccctgcagccctggtgcggaatccactgggtgaagccagctgggctcctgagtctggtggagacttggagaacctttatgtctagctcagggatcgtaaatacaccaatcagcaccctgtgtctagctcaggttctgtgaatgcaccaatccacactctgtatctagctactctgatggggccttggagaacctttatgtctagctcagggattgtaaatacaccaatcggcactctgtatctagctcaaggtttgtaaacacaccaatcagcaccctgtgtctagctcagggtatgtgaatgcaccaatcgacagtctgtatctggctactttcatgggcatccgtgtgaagagaccaccaaacaggctttgtgtgagcaataaagcttttatcacctgggtgcaggtgggctgagtccgaaaagagagtcagcgaagggagataagggtggggccgttttataggatttgggtaggtaaaggaaaattacagtcaaagggggtttgttctctggcgggcaggagtggggggtcgcaaggtgctcagtgggggtgctttttgagccaggatgagccaggaaaaggactttcacaaggtaatgtcatcaattaaggcaaggacccgccatttacacctcttttgtggtggaatgtcatcagttaagttggggcagggcatattcacttcttttgtgattcttcagttacttcaggccatctgggcgtatatgtgcaagttacaggggatgcgatggcttggcttgggctcagaggcttgacagctactctggtggggccttggagaatgtttgtgtcgacactctgtatctagttaatctagtggggacgtggagaacctttgtgtctagctcagggattgtaaacgcaccaatcagcgccctgtcaaaacagaccactcggctctaccaatcagcaggatgtgggtggggccagataagagaataaaagcaggctgcccgagccagcagtggcaacgggcacaggtccccatccacaatatggcagctttgttcttttgctgtttgcgataaatcttgctactgctcgctttttgggtccacactgcttttatgagctgtaacactcaccacgaaggtctgcagcttcactcctgaagccactaagaccacgagcccaccgggaggaatgaacaactccggccgcgctgccttaagagctataacactcaccgcgaaggtctgcagcttcactcctcagccagcgagaccacgaacccaccagaaggaagaaactgcgaacacatctgaacatcagaaggaacaaactccagatgcaccaccttaagagctgtaacactcactgcgagggtccgcggcttccttcttgaagtcagtgagaccaagcactcaccagtttcggacacaagcccaggagtttgagatcagcctgggcaacatgatgaaatgccctctctgcaaaaaaaaaaaaattacaaaaattggcggagcatggtggtccgtgcctgtggtcccagctacgcgggaggctaaagtgggaggatcgcttgagcctgggaggtgaagactgcagtgagctgtgattgtaccacagccctctaggctgggggacagactgagaccctgtttcccctccgcaaaaaaattgacaaaagtgtaataagaggtgcctgatatggctaggcgcagtggctcatgcctgtaatcccagcactttgggaagccgaggcgggcgggtcacctaaggtcaggagtgtgagaccagcctggccaacatggagaaagcccatctcttctaaaaatacaaaattagccggctgtgggggcagtggtggagcatgcctgtaatcccagctactcaggaggctgaggcaggagaatcacttgaacccaggaggcggcggttgcagtgagccgagatcgtgccattgcactccacccactccagcctgggcaacaagagccaaactctgtcttaaaaaaaaaaaaaaaaagtgcctgacatataagaggtgtgcaatgcaatagttgccaggcaacatgtttaagaatgtggagctcctgccttccatggtcctgttaaaaacccaccctcaaggccaggtgcagtggctcatgcctataatcccagcactttgggaggccgaggcgggtggatcacctgaggtcaggagttcgagaccagcctgaccaccaacatggtgaaatcccacctctactaaaaatacaaaattagatgagcatggtggtgcatgcctgtaatcccacctacttgggaggctgaggcaggaaaatcactagaaccagggaggcggaggttgtagtgagccgagatcgtgccattgcactccagcctgagcaatgagcgaaactccatctcaaaaaaacaacaacaaaaacccaccctctactcccagggagctgggtacagagctgggccacatcagtgcaaggtgctgagccacagagctaaggcggagctgcaggaccgcggaccagataacagtgtgtgagatcagtgtgtgagatcagacgtccctgccattggtgaccaccagggggcccccaagcaccagagatggccccatccagtcaccacatccacttctcatccagagatgtctgtttcttggcacgctggggtaaattaggacagaaggtgacagtcttgggtgtggtcagtcagactgccccaggcaggccttgtggcctgtagaaaacgttcaggcctaggccgggcacggtggctcacgcctgtaatcccagcactttgggaggccgaggcgggtggatcacgaggtcaggagatcgtgaccatcctggctaacacggtgaaaccccgtctctactaaaaatacaaaaaattggccgggcatggtggcgggcacctgtagttccagctactcgggaggctgaggcaggagaatggcgtgaacccgagaggcagagtttgcagtgagccgagatcgcgccactgcactccagcctgggcgacagagcaagactccatctggaaaagaaaaagaaaacgttcaggtctgagccagaggcccaggctgtaattctgtcacttaccatgaccttgggcaaggcacttccttccctggcccagttcacggggttggaatcgactccaaggtcccttccagcattaacgctgcatggttctaagatgagaagatggggcagtttcccctctctcaccccagcccgtgtccacttcaaggtgaatgaccagggaagtcacgtgtcccaatcccgcagttccaaagcccttggggaccctactgtcagggtcgtgcacgaggaggtgaaggtcaggtgagccaatcgcctcgaagggtcttgcctcattcgggacagacatccggtttcctctggctctaccgggattctaggggctttagccgaatgagtcatggggggcgggggggtttctgggggagttcccagctaatcaacttgggacaggacagcctggaactttcgatggtgcctatccaagtgtggggtgggcacagcagccaagacccaatgtccttatctcaggtaggggctcaggaggtctcccagacaggcagcctccggagagtttgggggtaggaatgggagcaaccagcttctttttttctctcttagaatttgggggcttgggggacaggcttgagaatcccaaaggagaggggcaaaggacactgcccccgcaagtctgccagagcagagagggagaccccgactcagctgccacttccccacaggctgctgccgcttccaggcgtctatcagcggctcagcctttgttcagctgttctgttcaaacactctggggccattcaggcctgggtggggcagcgggaggaagggagtttgaggggggcaaggcgacgtcaaaggaggatcagagattccacaatttcacaaaactttcgcaaacagctttttgttccaacccccctgcattgtcttggacaccaaatttgcataaatcctgggaagttattactaagccttagtcgtggccccaggtaatttcctcccaggcctccatggggttatgtataaaggcccccctagagctgggccccaaaacagcccggagcctgcagcccagccccacccagacccatggctggacctgccacccagagccccatgaagctgatgggtgagtgtcttggcccaggatgggagagccgcctgccctggcatgggagggaggctggtgtgacagaggggctggggatccccgttctgggaatggggattaaaggcacccagtgtccccgagagggcctcaggtggtagggaacagcatgtctcctgagcccgctctgtccccagccctgcagctgctgctgtggcacagtgcactctggacagtgcaggaagccacccccctgggccctgccagctccctgccccagagcttcctgctcaagtgcttagagcaagtgaggaagatccagggcgatggcgcagcgctccaggagaagctggtgagtgaggtgggtgagagggctgtggagggaagcccggtggggagagctaagggggatggaactgcagggccaacatcctctggaagggacgtgggagaatattaggagcagtggagctggggaaggctgggaagggacttggggaggaggaccttggtggggacagtgctcgggagggctggctgggatgggagtggaggcattacattcaggagaaagggcaagggcccctgtgagatcagagagtgggggtgcagggcagagaggaactgaacagcctggcaggacatggagggaggggaaagaccagagagtcggggaggacccgggaaggagcggcgacccggccatggcgagtctcactcagcatccttccatccccagtgtgccacctacaagctgtgccaccccgaggagctggtgctgctcggacactctctgggcatcccctgggctcccctgagcagctgccccagccaggccctgcagctggtgagtgtcaggaaaggataaggctaatgaggagggggaaggagaggaggaacacccatgggctcccccatgtctccaggttccaagctgggggcctgacgtatctcaggcagcaccccctaactcttccgctctgtctcacaggcaggctgcttgagccaactccatagcggccttttcctctaccaggggctcctgcaggccctggaagggatctcccccgagttgggtcccaccttggacacactgcagctggacgtcgccgactttgccaccaccatctggcagcaggtgagccttgttgggcagggtggccaaggtcgtgctggcattctgggcaccacagccaggcctgtgtatgggccctgtccatgctgtcacccccagcatttcctcatttgtaataacgcccactcagaagggcccaaccactgatcacagctttcccccacagatggaagaactgggaatggcccctgccctgcagcccacccagggtgccatgccggccttcgcctctgctttccagcgccgggcaggaggggtcctggttgcctcccatctgcagagcttcctggaggtgtcgtaccgcgttctacgccaccttgcccagccctgagccaagccctccccatcccatgtatttatctctatttaatatttatgtctatttaagcctcatatttaaagacagggaagagcagaacggagccccaggcctctgtgtccttccctgcatttctgagtttcattctcctgcctgtagcagtgagaaaaagctcctgtcctcccatcccctggactgggaggtagataggtaaataccaagtatttattactatgactgctccccagccctggctctgcaatgggcactgggatgagccgctgtgagcccctggtcctgagggtccccacctgggacccttgagagtatcaggtctcccacgtgggagacaagaaatccctgtttaatatttaaacagcagtgttccccatctgggtccttgcacccctcactctggcctcagccgactgcacagcggcccctgcatccccttggctgtgaggcccctggacaagcagaggtggccagagctgggaggcatggccctggggtcccacgaatttgctggggaatctcgtttttcttcttaagacttttgggacatggtttgactcccgaacatcaccgacgcgtctcctgtttttctgggtggcctcgggacacctgccctgcccccacgagggtcaggactgtgactctttttagggccaggcaggtgcctggacatttgccttgctggacggggactggggatgtgggagggagcagacaggaggaatcatgtcaggcctgtgtgtgaaaggaagctccactgtcaccctccacctcttcaccccccactcaccagtgtcccctccactgtcacattgtaactgaacttcaggataataaagtgtttgcctccagtcacgtccttcctccttcttgagtccagctggtgcctggccaggggctggggaggtggctgaagggtgggagaggccagagggaggtcggggaggaggtctggggaggaggtccagggaggaggaggaaagttctcaagttcgtctgacattcattccgttagcacatatttatctgagcacctactctgtgcagacgctgggctaagtgctggggacacagcagggaacaaggcagacatggaatctgcactcgagcagccaaagcctggcagggaagacagaggcacagggaccatgggaacccggaaaggagagggcatggggtctgggtgggcttaacaggccagacacagccagacaagatgaagccagggagtgctgagcatctgcaccaggcttgtcatttaccatcttccataaacttgagcccatccatcaagttgcccacaaagtggaagccaagttcaaggtgaccactggggtcagagcttctctcctcagactcggtctctgcactcgccccagctggtcacttcctgcttgtggcagccttgggctgaagagcgctaagctcacagcccaggagggtggggagctgtggcaagcagggggggcagcgaccgcaccacaggtgtgaggcctgcctgcagccaaagactcctgtgtggctttggggtacccccaccagtccccagtccactatctgcccaaaccttctcctcctcagctcctcagtccctcccacctcccctgcccgtggctcctcggaaagcagggtcagaagttcccactgccagctcggagtcatccatctaggggctcagagatgtgtgaggcaggcaaggaagggttaaagaaaggtccggcccctcatccccccgcctcccatcccccagtccttttttggaggcaacagatcaaatcccaggctagtcagagtgtgggtggtgttggaccaggttcgggagacagcagagcaggccaccctgccccagcactgtggggccctgagccaaagcctctcccctttcagggtacagctggctttgggggagggggcagcaggccagccaacttggctccaaggaagggaagctgctttcccctggcccttccccagctgagcaagcccacataggaccctgagccctgccgcctctgctcctcttcctcctcctcctcaccacaggagtgagccgttccctggccacagcacaggagtccagggagaggacactatgccctgccccgggtggcaccaataccaacagcacacacagtcacaaagggagccacgaggagctttatttatacatgaacgaaggtagatttccctcacatattacaaaatacacacaaacacacacacacacacacacacacacacatacacactttgcatctagaaagttcctcagaggtaagactactcctgggctggggcgggcgcacacaggggtgaccactgggcttgtggtccaggctgctcactctcctcaggtgccagcagatggagaggaaattttgaaagaagaaaccgggagacatcctggaggtcaggagtcaggagcggggaactggaagccgctagaggctcttgcaccatgtggagcggatgtgaggcacgatgcctcatctttcctcactgcttcccttggaggcgcctggggctgcgccagtccccagcccccactgcggccatgccaagcccctcagagtgcagcaatggctttagcagccacctggcggcccaggggcaggctgaggtccgtgatggccagaaccaccttggggctggacatggctgacaccttcaccagttccgacacctgccacggacagacagatgctgcttgcgggacggctggtggtgggtgtgctgtcccagggggaaggaggcccctccctgctctaagggctgccccgaggccccagcaccagcaggagagccgggaaggtggtactcacggtggtgaagggcatgaactgcaggacgctgccacggccaccctgctccaggcagtccacacactcctccatgaaccactgcacgaactgggtgtgggggccagcggtgcgagaccccaggatggaggagatgagcaggaacaggttggctgtagagagtggggggagagtgacaggagggagttccatgagagtgggtgaggtcacactctgggagaaggtgggactgaaaagggaaaagaaacacatgctgagcatgtccccaaaatggggtgtcagagagagaaaatataaaaggcaattggggaggggaggagggggaactagacaggagcctgggggccaggacagccaacaatgaggggcatggagagggaagggaggggcaccgcaaggccccttccagctgacaaggtctcccagcctccatgagaagagagactcgtccagcttagccccaggttcggcagcaggggtggggaactcacccaggactcggttcagagggtcccgcatgttgaccgtgtggagctgagaggctgagagggagctgctcatggatcggtctgctgtgggacggagcagatggagcgctgggaaacagcctgccgagtgcaaaagtggtgctccccggggatgccccaacccgaccttcacccatcggaggtaactggtacatggagagcccagagaagaccctgagatcaagagcacaaagggaggccaggtacagtggctcacacctgtaatcccagcattttgggaggccgaggcaggaggatcgcttgagtccaggagtttgagaccagccttggcaactagcgagacctcatctctacaaaaaatacaaaaattagctgggtgtggtgccaacgcctgtagtcccagctcctcgggaggctgaggcagactgcttgagcctaggagaacaaggctgcagtgagccgagatggtgccactgcactccagcctgagcaacagagcaaaaccgtgtctcagaaaaacaggctgggcgtggtggctcacgcctgtaatcccagcactttgggaggccaaggcgggtggatcatctgagttcaggagttcgagaccagcctgaccaatatggtgaaaccccgtctctactaaaaatacaaaaattagccaggcgttgtggcaggcgcctgtagtcccagagactcaggaggctgagacaggaaaattgcttaaacccaggaggcggaggttgcagtaagctgagatcgtgcgactgcactccagcctgggcaacagagggagactccaactcaaacaaacaaacaaacaaacaaacaaaaaacaaaacaaaaaaagggcacagagggacctcagatacagagatcccaatggaatgagagagaaaaactaacatgtggtgagcacacagggccaggggccgatcttggtacttcctaagctgcttactcctcacaacaccccatttacagatgaggagacccagacgggggctggctcagtcgctagctaaaggtcacagcacttgtagctggcaaacctagcatctttcttctgatcaagtgtatagttggtcccctagttcctaaaaggcttcagagaaaagttcaggctcaggagaaatctctggaaacaggaaaaatgccacagaaggaacccttggcagtaagcctggcagggaggaggggacagtgaaaaggatgacctccagggaagtggttggtggggggtgtgctctttaggcaggaaggtggggagtagccccatgccccagcccgggcctctccgggcatgttttgggggaaggaaggaaggaaggtcagagctggtgagtcaatggcacaggctgtgcctgaggcagtgaactcactcacttgggtagcttgtcatcccctcaaccctggggtaagggaggggcaggagggctgtgggggaacaactgtgggctgggctggacctgggcagaggagcttcaaccctcagggagtgagaacagcaacctcttctccaggggcaggacacagagcacccccttgggggctagaacagcaggtccctgccacaccctctctgaccagctgcaaagatgcctgcagctggggcagcggcagagtggcagcatcggggagtgaattcccaggaaaaggagcggcgcgcggccagcccacacactcactggggctcgaaaggatgttggcatcgtcctcattagagctcagcagtcgcatcaacttcgaaggctgcacatcgtccagggggaagaggctgatataatcctagagggagtgaaagtcactgttatacacccctaaaccccccagtttccagctgtcagggaaaagagcttgagctccgatttgagcgaggtcagcatggctagcagggcctcagcccctctctgctcaacccctcccacaatctgacaggccccttgtgcccatgggcaagctggggccacacaaatcacccatgcagattcctgaccaatcatgcccaggcacagctgccccaagggcaggggccacaactgcttccctttgcctggggaatccttaggaaatgctgtaacaaaccggtgaacaagtgaagccggcgagggcagctggggggcctacctcaatgtcttcgcggtgtctcttcttctggcgggtggacgcctgtcccttgtgggaggagtaggaactgagggcacaccacacggccagcctggcaaagggttccagaaaaagggggacagtgagaggtgccccaggagctttctgtgtctgactgggctccccaaagcccagtctcccagggtggcaccaggcgaggggtgcttgaccctgggtggccggagcagggcaagctctgaagagaatcttacttggcaagagcagtgcccggggggtccatgaggctgtgccacttggaggagtcagtgagcaggccaggtaggatgtggcccagcaggaccagggtcacttgctgcatgtccaggcagaagatggagtagagcagctccactgcccgcagcgtgtgctccttccgcgtctccttcagcagctcctagtgcgcaggaaagggggcagttcaggagccaggggcccgggatctggggctcctacaccctgccaccccagcatggctgtccagtaaggcccgcagagggggccccagatgttgctccgcccctcaggctgaatcccagtctctggccagagctccccaaggaggcaactctgaggcgaggcattccggggaggccacctggctcacggcagcctctcagggaagcctggcagaccaggccaggtgtggggagccaggggacaggacccatgtcggcccacagccactccagcccaagtaccttaatcaggttgttgcagaaccagtagacgccgcccatgtgcagcagggtgtcaaagatgtggatggagcggctgtccacccagcccttctccagcaccttggcaaaaatgtccgtcagcacctctttgatgggccgcttggggggcagcaggttccagtagggcattgtgtccaccccggtggagggaaacttgatctgcgtggctgtctgctgcagcacgtcggcacacatgcgctccaggatcgagttcatgatcaccaccctgggggagggccgagagaacctgaggctcaggtgccactgtagggtggggagggagaggagggaacacccatgccagactttcccttggacttaggttacggaaatctccctgaggcattaacccagttttgcgctgggggacggtataccccggggtgacctggcccctgctctgctcctggcaggtctctcacctgcaggacacaaagcctataaatagggactggggagggactttcctccccctggccattccagccagatattcacattttcttttattctccaacttcccccatcccccaggcctgggccctgccaacctgccacataaataaacacaatcacttccccctaggctgagtgcttgggggtccccgcccagccctggcctcctcccaaagtaaactgttccttccaggagaggcccaagggctgccccacaggactcttcccggcccctggtagctgggcagatagaagtgtatatccaggaattttctcatggaaagaggcttcggaagtgaatacagacccgggccgagtgctgactgttcctggaatgcagggtggctctgggaaagttgctatgacctttagagccacttttcccacctgcacaatggagccacagacttctcactaccccttacccagataggatttagggtgcttagaatgggttacaccagagcaaaagctccctacttggtagggcgggggggaaggtggtggagaaatgagagaagaaaggaaaaaaggaggaggcaaggggaaaacgagatgtgcttttccagaccgtccaaacctcattcagctcaatgcttccccttctccctattaagacatcctcaggcccggtgcggtggctcatgcctataatcccagcacttcaggaggctgaggcgggaagatcacctgaaatcaggagttcgagaccagcctggccaacatggtgaaaccccatctctaccaaaaatacaaaaattagccgggtgtggtggcacatgcctgtaatcccggctactcgggaggctgaggcaggagaatctcttgaacccaggaggcggagattgcagtgagcctagatagtgccacagcactccagcctgggtgacagagcgaaacgccgtctcaaaaataagtacataaataaataaataaagacatcctcaacgttgccataaagacatggcaacacccaaaacgtattagctggtaaacacccatgttcacagcagcactattcactatagcccaaaggtggaagcaactgaagtgtccactgacagaggagggatcaagatgtggtatagccacacaatagaggtttcttttgtttttgttttgttttttgagacagagtctcactctttcacccaggctggagtgcagtggcgtgatctcggctcactgcaacctccgcttcctgggttcaagcaattctcctgtctcagcctcccaagtagctgggattgcaggcgcctgccaccactccctgctcatttttatatttttagtaaggccaaggtttcaccatgttggtcaggctggccttaaactcctgacctcaagtgagccactcacctcagcctcccaaagtgctaggattgcaggcgtgagccaccacgcccggcccacaacagagtattattcagccttaaaaaggaaggaattcctgtcacgtgctactacatggatgagctttgaggacaccatgctgagtgaagtcagtgagtcacgaaaaggcaaggactgtatgattccagttaaatgaggcatctaaaaagtagtcaaattcagcagggcacggtgggtcacgcctgtaatcccagcactttgggagaccacggtgagaggatcactcaaggccaggagttcaagacctggcaatatagtgagaccctgtctctacaaagactagaaaaattagccggctgtgggcctgcagtcccagctactcgggaggctgaggcgagaggatcacttgagcccaggaatttgaggttgcagtgagactcactctgatctgggcaagggtaagaccttgtctcaacaacaacaacaacaaaaagtataaagtagtcaaattcctagacacacaaagtaaaatggtagttaccaggagctggagggaggggaaaataggaagctgttgttcagtgggtatggagtttcagagatgcaagaaagttctggagacctgttacacaacagtgtgaatatacttaacactactgaacagtacacttaaacatggctaagatggcaaatcttatgtgttttttacaattaaaaaaagcaaacaacttattggttgggtgaatgaactcaacgtaactggtcaccagggaagtcctccaagcccctgaagagccagggcaggaaactgtcctaagaggtaactgagggtggggcatggcctgtaaaatctacagacaggttcctagctcctagacagtcacacagctttgttcttttgggagctagttgtctagaacttgagtctctgcgggcagaccctgtttagggtctgcatttctgacaacacagcaggtgctggcatataaacgcttctgccacagagacacagtacatgtttgctgagtcagatgagtgaatgcatgaataggaaagtgagtgagtgatcaagtagcgtgtttgcgaaggtcagaaaagagaggggtgcttgttattggatgtgctgacttctcacaacacacttgaagggtctgagaagggaaggcaggttaccgacctctcattgtagaactgcagggtgttctcactaaacagtggccctgccagctggcggatcatctgcagcgacttctcacgctcatccagccccagcatccggacgtgggccacaagccaagccacagcacacaccgccagactgcataccttccctttgatgttatcagtgattttctaggggagacggaaaggtgatgggctaccatctatctccctttcttgagccaacatcaccttctcagcctctgcgggcagctaagtgcagcgggtggagtcccgggccacattccacacctctctccacaagtttgatcttcccagagctacctgggccagagggagtagctaagacaacgattacacaaaatatcaatatcaaaacatgagctcctggattaaaggtcttcttgcccttacgaaatataacaagtcatcactggctggctctgtgtctcaggggagcaaacgctgctgggaaggcggggctacctggatggactcgaaggccaggaccccattctcccaggcattgaggatttccaagatggcggctgagatgctgagacaggcctcatgccacttcatctgcctgcgggtgtgcagagaagtcagcacaggggagcaaggaacgggctcagggagcgggtcttgaccctgcccccaccgccacccttggagtgggcgcccgggccactgacactagcttcatctccgaggagttgttgagcagggccaccagggactccactttggtggagtcggggcggaagcaggggtggtcagggttcaggatcttgccctcctcaggcatgcaggtctgcatccaggtctcgaagaagggcacctcagctcctgtgcgcgactcggacagaatcacctgggaaaggggaaggggggcaccagccgagtggggagggcgcggcgcctgccagcgctggacctggggctgcactgtttcccgccaggctgctgctccagcccagcccaaagactggggacgaactggtctaagggagccagacgggggcaatgctgccacctagtggtcaatgtgaacatagggctgaaggtgcctctacggactccagcccgggtgggcacctggtttctgaggcccacagaactaactggctgagaggctgcgggggcgcaggcagtgaggtggggagagttccgggttacctccttcccttgagcccccgtcccggtcgctcccctctctcacctctgaaccataggtctgggccacatggcacagcatgaggaaggagatgtcaaacagcagggcccggacggaggccggtttggctgtggaaggacgggaaggctgagctcccagacgagggcaggggggagcccgtgtctgggttgacagggatcgggatttgcctctaggaaggtcagggaccaagtggctccttcaaagctctgaggctcagaatccttttcttgagtctcaactggaacatcatcccttccttgagaccaaagacccccagcaccctctcctggcatacctaaccaagtcgtaaagggatgagggggggaaggagacacagggatggtctgggaagaatccttttccagcattatccactttcaagctctgtggaagcttccattggtcatggctctgaggagggagcacagcctccccctgttgagctggggagccctcctccctcccacactctcccgccacacccctcctcagggcccactgggcctgcggatgcacagggctgacttactgctttcttcgctgccataggttgtgaattcattcaaactgaaaggaatggagacaggctgcattgaccagggcatgagctgagcagtagctgggcgctggggctacacatgttcagagagcgatagctagagtctgagttactggttaaacttaaaatgagacacattgctatagaaaaaaggtttttgtggtttttgttttttgttttttttttgttttttttgagaaagagtctcgctctgtcacccaggctggagtgcagtggcacaatctcagctcactgcaacctccgcctctgttcaagcaattcttctgcctcagtctcccaagtagctgggattacaggtgcccgccaccacacccggctaattttttgtatttttagtagagacagggtttcaccaagttggccaggccggtcttgaactcctgacctcaggtgatccgcccaccttggcctccctaagtgctaggattacaggcgtgagccaccgcacccggccagaaggatttttattgttagaagatttccaaggcctagagaatggctcactgaatggaaccatgttctatatatgtcaaattccagggcaatcaaaaaaggcaacagaatttgagagccccttattaataactgggcatacttggaattcctccatgcccaatgttcaacacctcaacccttaccctcatctctttaccaaacatgtccactccatcctcagctgaagagaaaggaacacttaggtcgtgagaacaggcccttcctccaagatctccagccaggatgctctgcctaggcccgtgggtctctggatgagacccagacccaggcacctgactcctaccctgctacctcctcccaacgcgcagcctccctgcacgccctggggtcaggggcttggccttcctcacttgatgaatttccgggcgaaggatttcagctttccagtggcggcggcggcagccagcagcaagtccagactcttcccggacagcatgtggcccaggactcccagcagtccctccggtgacttagagtggtctgcatccatcgtctggggacaggacaggaaatcaagtcctgaagaacactgaagaccccccacccaagatacagcctagccacattttctctcttcacaacctggaatgtaatctacatctttctgacttcaatctggaaaatcattcctaaaacccacccctgctctccgatccatccctctcatctacactggcatgcaggtggtaaggttggagtgggcaaggtcacggctaggatcttctctgtcctttccttttttagacagagtctcgctctatcgctgaggctggagtgcagtggtgcgatcttggctcactgcaacctctgccccccagggttcagcgattctcctgcctcagcctcccaagtaactgggattacaggcatgcaccaccacacccagtgaattttgtgtttttagtagagactgggtttcaccacgctggccaagctggtctcaaactcctgacctcaagggatcttcccacctcagcctcccaaaatgctgggattacaggcgtgagccaccgcacccacgtctctgttgtttccatgtgagatggcctaagtgaaagcgcctactgcagtgcctggtgtacaaatgaagctcccacgggttagcattcagtggtagctgcccttgcctcccctttcactacctccaaagcaactatgtataaaagctaaaggagacagaggtctgtggcctctgtttatttatctgcaagcagatggagcactggaaagaagaaagagaagactgtggtggccagggaagggcacactcaccttgaggatgtttgtgacagtgggctccgcccggaggatcagctggatgttgggctggatgttggcattctctcccgatttctgctggggtgcgtgctctcggtccgctttgctgtggacatcaccagttggccaaggaagggaagaggaatgaagagaaattcttgacacgttccctcgttcaagcccggaaggaaatgcgcagaggaggtgggaagcatgtaagaacctccgaggttggggtgaagtttatggaagcatagtcaatgttgcaatcactgatttagcattagtctttttttttgagacaggtctcactctgttgcccaggctggagtacagtggcacgatctcggctcactgcagcctctgcctccagagtagctgggcgctcaccaccacgcctggctacttttttgtatttttagtagagacggggtttcaccatgttctactggtctcaaactcctgacctcaggtgatccacccaccttggcttcccaaagtcctgggattacaggtgagccagcacacctggcaatttatcattagtcttttttttttttgagacagagtctcgctctgtcacccaggctggaatgcagtggcgcgatctcagctcagtacaacctctgctttccgggttcaagtgattctcctgcctcagcctcctgagtagctggaattacaggtgcataccatcgcgcctgattaatttttgtatttttagtagagatggggtttcaccacgttggccaggctggtctcaaactcctgacctcgtgatccacccgccttggcctcccaaatgctgggattacaggtgtgagccaccgcagccggcctatcattagtcttaaatgctctgaaagcacatttaagattaaaggaagattcaggatttttatttatttatttattttttttttgagacaaggtctcactctatcgcccaggctggggtgcagtggcatgatttcgcctcaccacaatctccgcctcctgggttcaagcaattctcgtgcctcagcctccagagtagctgagattacaggcacacaccaccacgcccagctgatttttgtatttttagtagacatggggttttgccatgttgggcaggctggtcttgaactcctggcctccaagtaatccacccgcctccagcctaggatttttacttttatcacaaagatgggtatgagttaaagagcagtgactaagagtgtaaaactctggtctgaagacatctgtgctttcttttccttcctgttccctgtacccccaggcacggtcccagtcacttgcagcccaaactttcgacaggaggttgaaaggcacgcagcagccccaccgtaacaagagagaggtcaaggggctcttggggtagcacaggtgcgttcacacttaccgcttagccataaggttgttgacgctggcctcagacagaagcccctgcttgccacattcttggagcaggaagtttgtacagtcacagctgtgagggagaaagatgctgagggaactgggcacctggataggatggtgaggggtgggagtggcaggtccctgagcagcatcctccctctttcaggatgaggaaaatctggagtgcctgagggacggtagaggggctctggggacttggcaactgtgggctcctatttcctgcccctgccaaggggagtgaacaaggagacagagtcccctgaggcttctctggcacagagatcaggggaagagcccagaacgccttccagtagggcgggggtgaccaggggagctcatacttgcagcgctggtcagctttgtccaacaagggggtgagcttcagcaggaactcaaaagcacagttgacatcctcagtgaagtcctagaaagaggcagaagtgtccatctggtttccagggccaccaggccctgatcatctcaggcaaccttgtctgctggaggcatcggcctgagttgcctggctgctttctgcctggagcctgggtgtatgttgtgggtgcacgcagacgctgaagcacacacactggctgaagcacacgtacacgctgaagcacacacacgctgaaacacacacactgaagcacgcacacactgaagcacacgcacatgctgaagcacacgcacatgctgaagcatgcacattgtgaagcacgtgcacgctgaggtgtacactcacatccggctctcttccaggcatgagaacactgcccagctggggcctgaaggaccctcccctttgcccttatttctgctcccatgcctccatctcaatccccaactcaccttgtctccatgagagtacttcttcaacttcaccaaaacctgtggaatctagggggtgaggcagggggaaaaacaggaagatccatttcttttctctttcatctacccctgaaggcatccccccgaacccctgctccaggaagagagacaggaacactcctaccctgggagtgagagcacacttagtgctaaatgagaaagccaataggtgcccaggcccctgatgcccccaggcctaggcacaggacacaagcaccctgcacctccgctagctcaacagaaaaagatgccataagcaaaagtggatccccagcttcaaggaggactggggcccctttccctggctccctttactgccctgcacctatctgtctgatgaccaagctaaactgcacctctgtggtaagaaacaacggagtctgccaaatgggctaaatatagccctggcactttcagagaaaatgatcaatgggaacttgcactggaatacctggcaggctgggcccagtgcccgcagggaggaacacagggcaaaggtccagggtgccactggtcttgctaagaaccattcctagactggctctgcccctcccacgtccccagtaccttgaggaaagtgaaagctgtccacttgagctcctccgtaccctcgggagactcaatgagccccacgaagcaagctttccagatctccaggacaaaaagtggggtggggatatgctgtgggaagagccaaggatgaggcctaagagggtgcccataccccgtcacccttctgtggactctgaggatttggctgggtcagagactgcatggcagagtcactgctcagctatgtgctgagaaccaggggagtaaggtccaatgacagaagtgtgcacgactggcacccactttccatcatggagcaggagaaaccccacttctcccagggagaaccagaagaatcctccctcctgcccccaacaggctggcctgccttggagaagggagagccactcggcccctcccacctgcatgcgcttcaccatcgtcagctgctccaccagggactgcgtctcgcctgtcaggttcatggtgccctcgagcaggatcacggcgtggacagtggggaagccggtcttgtgcatctgctccgcatgcacagacagcatcgtggggatgctgaggggtcacaaacacaggggacggtgtttggggggccaaaggtgaaggcggagaggatggcacgggtgccacatcttcctaccccagggcgtgtcctccctctcccttctccaccatcccccagggagccggtacctcctaatgagggtgccacactgctcggcctgactccggagctgcgggttgctgagattggccaggatctctccaagtttcaagagagaatgctcgatggcagtccaagaagctggcagagggaaggaagtacagaaacatgatgggaaacaggagagaaggagcacctggccctgaactcctcgattttggcactccctccggcacacgaaaccacacaggaaggcttcccctgaggacaacagggagggaggggcctgagggcagcatgcactgtttccagaaggggggtgggcacctagagctggaaaccccagagaccattcccaaaagcctgatttccaggggacacagccagctgacttcagaaggtatggcatcacacaggctcaggagagagaggcagagggaggccagaatccagtggctggaacagggagggcggccacaaatcactcgaggagtgagcggatcccaaagtccagtcttgcagaggctgtcactctcctctgggggaactgggtccctaaatggctttctcattctcaaccactccctcatctaggcattgcgtttgctgccctcccctgctgaaggcctcttacacactctctctcaaactcccaccatgctctaagcttctgttcaagccccagttcctttagcaactcacccgactggtctaactcactgttctctccttaatgcccacactcatggtctaagccatattggttagcactgaactataagttacttatcctagttacaattccagagggtcaaatgatgaataatggcaccaactagcccattaacctccatggagcataaaagggggaaaaaaagacaagacctgagatccattaaaattcagtattcatccgattttcagccaataaacatttatcaagggcccaaggtagggaagaggctgtcaacacagtccatttttatataaagattgtctttttggacttttcacaggcagtaaaacatacttggggaagaaataaatatactagtcctaaaacaagctctccaaccaggtcctgaagcctcgagagtagcccattctagcattcttgttcctggagaacaagagacctgtaggtggtcccaagccacttgggcttcaaggagcaagactatggccttaggaccccattgctggaaatactggcatcttccctcccgccaggtgatctgtctgttctcaggctctggaaagtacccaaacttaacatctgaacttgagtcaagaggcatatggtacaacaggcccaacagcagacaggcactgtgttaaaaggggcattttaggtaacattcaaatacaagagtcatctgcttccaagcgatgagtaacatggagacaaacacaataatggacactgtgcttgtcttgtcctctagttttttcctcgtctgtgatgtactagtcttgctacccactagcagctatgcttgatgagggcagggaccctgccacatgctcctttggtagccccccaccccccacccccagcacctagcacagtgctgggtatacaacaatgctcagtaaatacctgttggttgattggctcgggtgccaccctgcccaagtccctgggatgtgtgcaatgcttatggggagaaaaaaaaggaagtgggatggtttcagatcctcctggaaagaggtgggatggcatcctgcctctcccttctcaattaaaggaccggctatgggagcagcggcaggtggggctcaggggaatcaagggacatacaggcctcctctagtttggcgatgtgcagcagggcccggttcttggtgctgctgagggttttctccaggcgctgaaggcacatggcaagctgcttctccccagcggctggagtgccggcctccagcccctcccgcagccgctctgcagaggctgccgtgcagcgcagcagccagtggagggcgctaagaagggctcggcacagtccgatgcattcctctgctttgccgtgacagctacagggaaggatgcaaaatcagactctgttcttccaatggctgaaatccgacccacatcaatgttccccagagtccctggcactcccctactagggactagggctgagaagctagcaaagtcctggggaagatgcttagcccctttggctcctactggacaagatttcaaatgagctactccagacagagaggaggcactctgtcctaagggagtaagaaaaggagggcacaggtaagtgtagatgggcaggtggggagaaaaaacgttggaacccggagttggtctcggtctgtgtgctaggagctgcacctctgcacaaagacaaggctggaacattgtattgtgagcccccttacccctgcccttacctcagacggtcacaaaacatgtccatgatgtccagcaatgcctggacacacaggtcccgagaaaagtcatcaaactgtggaaaggacagtggagatgctacggaatgcctccatccacccccaggtctcacatgaggcagacggtgcattcaggactcctgctcctctctcctccaaccctgggttccagactcagcatcctcaacactggacattggctcccaagcaccagcccctacttgccaggatccccctcccatggaagtccagcaatgccagccagaggcatcatgtgctgcctatccagcctcacgggtcacagcatcagggccgtcaaggaggcggggccttgtctgtcatccccaatctagctcctgagtgtctatggtcataccttactgatggctgtgaggacagaagagtaggacaccatctggagagaaggaagaaagataatctttagacaactagtctcccacagttgagaggaacaaacactgatgcttcaagttgctgcagctctcctgaacctcaaccccttccacaggccctcttcaacccaagcaaggagaggcagtgtcactgtgcactgccctgttcctgcctctgtcagacttactgcaaatggtatcagcataagcccatcaagaagatgattctggggatgctcaaaggctccatgtttcaggccgagcatggtggctcatgcctgtaatcccaaaactttgggaggccgaggcgggcggatcacgaggtgaggagtttgagaccatcccgcccaacatggtgaaaccccgtctctactaaaaattaaaaattagctgggtgtggtggtgcgtgcctataatcccagctactcaggaggctgaggtaggagaatcgcttgaatcagggagttggaggttgcagtgagccgagattgtgccactgcagtccagactgggagcagagcgagactctgtctcaaaaaaaaaaaaaaaaaaaagcgcctgctactcactgtcctcaataagcatgggttaactgacggctagtgggcagaagcatgggcaagagtgaagccatgtcactgtattcctacagcttccggcaagaacagaggttttaatgggtaagaactagagacaaacaaacatttcctgcactgagcaggtagtacctgcaccttgaaacagggagtggctgggcgtggtggctcacgtttgtaatcccagtactttgggaggctgaggcaggattacctgaggtcaggagttcaagactagcctggccaacatggtgaaaccctgtctctactaaaaatacaaaaattagctgggcctggtggcctatgcctgtaatctcagctacttgggaggctgaggcaggagagctgcttgagcctgggagacggatgttgcagtgagacgaaatcttgccaccgcactctaacctgggtgacagagtgagactctgtcaaaagaaaagaaagggagggagagagagagaaagagggaaggaaggaaggaaggaaggaaagaaggaaagaaggaaagagtaagttttactgtacaaactcttatttgttctccagaacttactccctaggacccatccaggacaccttccctgatcaaccccaacctcccccacaaagctgaaacccttcctctgtgctccaagtaatcacctaaggctcatcattacacggcgggtgcctgcagtccccactaaattagaagctccttgaggacaaggatgcttttactcagtgaccaccacaaacttgatgtttgtagaatgaataaataaaaacacctttagctcagcatgtctcaaagtagcttccaaagctgccctacccaatacacaagtcactagccccatatggttatttaaatttaaattaattaaagttaaataaaatttggccaggtgtggtggctcacgcctgtaatcccagcactttgggaggccaaggcgggaggatcatgaggtcaagagatcaagaccatcctggctgacacggtgaaaccccgtctctactaataatacaaaaaattagccgggcatggtggcgggtgcctatagtcccagctactagggaggctgaggcaggagaatggcgtgaacccgggaggcagagcttgcagtgagccgagattgcgccactgcactccagtgtgggcgacagagctagactctgtctcaaaaaaaaaaaaaaagaaatgtcacacacataccctgagcttgtgtgtgacataaatttgagaaacactggattaaacatataacgagaactttaccacagaacttctcggaaccatgatatactcgtatacaatgagaatctctaagaagactgacgataaaacaaagcaatatcctttaaacttacttgaccaaggaatttcatgtacccagtatttccaaaatacattttgggaaattctacctgaacagtaagttcccagaggacagagatggtattgaatttatatctgtttctctagcatccagcccaagaactgatacacaataggtcctcaggaagtttttattgctttgaacagatgaattctactaactagttgccttctggaaaaatcttaccttaaaataaatttctgttagtaaaacctattcatcaccatcataagactggatatctagttcagctgtctctgctggaggagtggaagcctccaaagatttaagaagaaagctgtcggccgggtgcagtcgctcacgcctgtaatcccagaactttgggaggccaaggagggtggatcacggggtcaagagatcaagaccatcctggccaacatggtgaaaccccgtctctgctaaaaatacaaaaactagccgggcgtggtggcgcatgcctgtaatcccagctactcaggaggctgaggcaggagaatcgcttgaacccaggaggcagtggttgcagagagccaagatcgcaccactgcactccagcctgatgacagagcaagactccatctcaaaaaaaaaaaaaaaaaggagaggaagaaagccgtctgctcaatcacctgggtttggcaaactttccatccatgtgcaatttccctctcaccaaaatacactgctctgttcagccatctttcactagtactcctgggtgaacaggagcaaaacacagagggcttaaataccatcagtgttcagaaccaccatactgtgaggccagggctagtgtctgatatccatcagaaagctgggagcctgcctgggcaggatgaccataacgttccggcgagcgttttgtttatttataactgatgtccccatagcgagtgcttggcaaagaagtgaaccttgctggataccaacctgcagggggagctggatgtccccactgaacactgaccctcaaatgccgggagagaaacccccaattatgcatgttccgagggatgccattcgtcaaaatgaatttatggtcttcaaattctgaattctgttcagcagatttctgctaactgtatcaataaagcacggctacttcagagacccaaaaatgctttctacatgacgaactgttttacacagcaggatctggcctattcaagtcttaatcattctatcacagtagaagctctaaaccaccacaggcccccagggcaggagaccctctgtgtggccaccatgcttgtggctagccccacctgaccctgcagctgctctcaaatcctctctgctcttctgaatattcaacaccccaactactcctaagtgccctctactcgcataacattgggccaaagagcctcttgactctgaaggaagaataaattactaattttgcacagcacttgagagggcacaaaggtctttcatatctatttacttctgttacttcagcctctttctctttcttccctttcccatcagtgtttatacatctcaagactcttctattggtctgtttgttgtttgagacagggtctcgctctgtcacccaggctggagtgcagtggtgctcccggattcaagcaatcctcccacctcagcctcctaagtagctgggactacaggtgcacaccaccatgcttaattttttttttttttttttttgagatggagtcttgctctctcgcccaggctggagtgcagcggcgagatctcagctcactgcaagctctgcctcccgagttcacaccattctcctgcctcagcctcccgagtagctgggactacaggcacccaccaccacgcccggctaattttttgtattcttagtagaagcggggtttcaccatgttagccaggatggtcacgatctcctgacctcgtgatctgcccacctcggcctcccaaagtgctgggattacaggtgtgagccaccatgccaggctaattttctttttttgagacagagtctcactctgttgcccaggctggagtgcagtggcacaatctcggctcactgcaacctctgcctcctgggttcaagcgattcttctgcctcagcctcccgagtagctgggactacaggcacgcgccaccatgcccggctaattttggtatttttagtagagatggagtttcactctgttggccaggctggtctcgaactcctgacctcatgatccacctgcctcggcctcccaaagtgctgggattacaagcgtgagccactgtgcccagctgcctgactttcgtattttttgcagagatggggttttgccgtgttgtcaagggtggtctcaaattcctggtcaagtgagttgcccacccacactggcctcccaaattcctgggattacaggtatgagcctggcctagattcttctatttttaaaagagtttcctatagaccccacacttccatttaaccaccaccccatctctgctactcttcacacatataaaagtttttttttttaattttattttcttttttttttttgagacagattctcactctgttgcccaggctggagtgcagtagcgcgatctcggctcactgcaacctccacctcccaggttcaagcaattctcctgcctcagccacctgagtagctgggattacaggcatgcaccaccacatccagcttatttttgtattagtagagacagagtttcgccatgttggccaggctggtcttgaactcctgacctcatgatccactcccttggcctcccaaagtgctgggattacaggtgtgagccactgaacccggcctttttaattttacttttttagtagagatagggtctatgttgtctaggctgggctcaaactcctggcctcaagtgatcctcctacctcggcctcaaaaagtgctgggattacaggtgtgagccaccacgcccggacaacataagagtcttctacactccctggctctacctgcacaccttccattgactattcaacgcactccaatcacttctgtcctgaccactctatgaatcttctcattaaggtcattgacaaactcttcatgttaaacctaatggatccttctctgttctgatcttacctgacttcccagcagcatctgaccccttgaaacattccctcacccctcaatcctctcttggcttttcttgataacactctcacttttcttccctactctctggccccttctcttcagactcctatgaggaattatcctcctaagtgtgttccttaaatgagattggttcctcaggaagttgggtttagtcacttctttgctcactctccctgctgtctctgcacaatctcatccatgcccatagctttgattaccatcagtagctggtgacttctaaaccaaaagctccagtctagaactctccttttgagtaccagacacgtatgttcaactgcctaccgagtatcctctttttgataccccacagtcttcttaaatttaaaaggccaagatcaaacatgtatcctcacccacatcccaaccctactctgctcttccactgtctcatgatccatcagctatctaatgtccaaaccagaaacctaagcgttatccttgaccccttctcctctctcactctgctcgtcccattaatcaaattgtttcaatgccacttcctaaactgttcttaaattcatcatttttttctgctgccacttcccaattttgtgctagtatcatttctcgcctgaattacagcaagagcctaaatcaggggttggaaaactacagtctgcaagtccaatttggctcatcactatttttcttaatcaaattttattagaacacagctatacccatttgtttacagatgggctatacctatttttgagctgtaatgacagaatagtgatgagagagaccattcagtctgcaaagctgaaaatacttactatctgggtcctttaaagacaaaatatgccagactcaatgatatccccatcttctgtcttacctccctccaactcgttcttcaaactataaccagagtgatctttttaaaattaatccacaaatgtccctaattaatctacaaagtcaaggaaatctggattaaaatataataggatttttatggtaacttaacgaattgattctaaaatttgtctggaaatgaaatgtctgaaaacagccaaaaaaattttgaaaaataaagaaactaagtgaagatttgtccaccaaggtatcaaaacatactataaagctctaataaagttctggtgcaacaaaagagaaagaggccgggcgcagtggctcacgcctgtaatcccagcactttcggaggctgagacagatggattatgaggtcgggagttcaagaccagcctggccaagatggtgaaaccccatctctactaaaaatacaaaaattagctgtgcgtggtggtgggcatctataatcccagctacttgggaggctgaggcagagaattgcttgatgcttgaacccaggaggaggaggttgcactgagccgagatcgcaccactgcactccagcctggaagacagagtgatactccgtctcaaaaaaaacagagaaagataccaatgaaatatactagggtgtcaaaaaatggacccttgtgtacaagagaatttaaaatttaagatatgacaaagaatggcctattcaataaagacagttgagccattatccatctatttgaacaaataataaatgtggatcccatcctcataccacaataaattctaaatggatcaaacaaagtaaatacaaaaaataaaagtccagtgttggcagaaattagagaatatatttttcattttattacgtatgtatgtatttatttattttgagataggatctcactctgtcacacaggctaaagtgcagtgatgtgatctcagctcaccgcaagtgcgcctccgcggttcaaaggattctgctgcctcagcctcccgagtagctgggattacagatgtgcgccaccatcagctaatttttacatttttagtagagacagggtttcaccatgttggccagactagtcttgaactcctaacctaaggtgatccacccacctcggcctcccaaagtgctgggagccaccacacccggcctgttgttaataatgagattttcccttcagatttccccttcccagatcccgttgtctcagactgatgggattttctccacagcctcttgactggctcaccaattgttgtgctggacccctattcactagggatggcaccaggttcaagaggctgaagggacctggagacagcagatgacacatagggttttgctaggcggaacttatatgcagggacagtccaggggtggtgggctggacaggagaaccgcctgtaattttttttcttagtatgcagaaattttttatgtttttgttgtcagttttatcctttttttcccttactggacttttgtcttccttaaggatttttctgcttcaaagatttaaataagccaggcgcggtggctcacgtctgtaatcccagcactttgggaggccgaggcgggcggatcacgaggtcaggagatcgagaccatcctggctaacactttcgtgaaaccccatctctactaaaaatacaaaaaattagccaggcgcagtggcgggcgcctgtaatcccagctactcaggaggctgaggcaggagaatggcatgaacccgggaggtggagcttgcagtgaaccgagatactgccactgcagtccggcctgggcagaagagcgagactccatctcaaaaaaaaaaaaaacaaagatttaaatattaggttcgagacccgcctggccaacatggagaaaccctgtctctactaaaaatacaaagattagccgggcgtggtggcacccgcccatagtcccagctacttggaggctgaggcaggagaatggctggaaccggggaagctaaggttgcaataagccgagatcacacagctgcactccagtctggatgaaggagtgagactctgtctcacaaaaaaaaaaaaaaaagccgtaacaaaaaaaaaaaatagaaaaataggcaaattatatatttatttgtgtatttatgaatacataaattatgtattcataaatacataggccgggcgcagtggcttacgcctgtaatcccagcactttgggagtccaaggcgggtggaccacatgaggtcaggagcttgagaacagcctcgctaacatggagaatccccgtatctactaaaaatacaaaaattagctgggcatggtggcgcatgcctgtaatcccagctactcgggaggctgaggcaggagaattgcttgaacccgggaggcagaggttgcagtgagccaagattatgccactacactccagcctgggcgacagagggagactccatctcaaaaaaaaaagaaagaaaagaaaatgcacattataatatgatataattatttgcctctggaaaaagttttaaaagattctggccaggcgcggtggctcacgcctataatctcagcactttgggaggccgaggtgggcggatcacgaggtcaggagatcgagaccatcctggctaacaagatgaaacgcatctctactaaaaatacaaaaattagccaggcgtggtcgtgggcacctgtagtcccagctacttgggaggctgaggcaggagaatggcgtgaatccaggaggtgcagcttgcagtgagccaagattgcaccactgcactccagcctgggcgacacagcgagactccatctcaaaaaaaaaaaaaaaaattatatccagcgttggcaaaggtatggggaaatactgtcagacattacggatggggtataacctaatccaatcattttcagggggaaatttgcaggatctactataatttagtatgtgtatattcttcaaatcagatattccattgtgaggtatccaccctagagaaatacttccagatatgcagacaggtaggtataaggatattcagtgaaacattgattataacagtaaaaaattacaaacaacctaaattaaagtacatatgggctgggccaggcacagtggctcacgcctgtgatcccagcactttgggaggccgaggcgggcagatcacttgaggtcaggagtttgagaccagcctggccaacatgatgaaaccctgtctctactaaaaataaaaaaatgggccaggtgtggtggtacatgcctgtaatcccagctacttgggaggctgaggcaggagaatcacttgaacccagcggcggggacaggaggaggttgcagtgagccaagatcgtgccactgctctccagcctgggcgacagagcaagacttcatctcaaaaaaaaaaaaaaaagtacatatggaatattatgtagcagtggtttaggggtgagctccatggctcacgcctataatcccaacactctgggaggccaaggtgggtagattgagctcaagagttcaagatgagcctgagcaacatggcgaaaccgtgtctctacacaaaatgcaaaaattggccgggtgttttggtgcgcacctgtagtccaagctacaggtgcaggaggatggcttgagccaaggaggtcaaagctgcagtgagccactattgtgccactgcactccagcctgggcaacaaagcaaggatcctgactctacacattttgttttttttgagacagagtctcgctctgtcaaccaggctggagtacagtggttcgatcttggctcactccaacctccgcctcctgggttcaagtgattctcctgcctcagcctcccgagtagctgggactacacgtgcatgccaccacacccaggtaattttttgtatttttagtagagatggggtttcaccatgttggccaggatggtctcggtctcctgacctcatgatccacccgcctcggcctcccaaagtgctgggattacaggcgtgagccatcacgcccagcctctaaaaaaaatttttttttttttttttgagacggagtctcactgttgcccaggctggagcgcagtggcgcgatctctgctcactgcaagctccgcctcccgggttcacgccattctcctgcctcagcctcccgagtagctgggactataggcacccgccaccacgcccggctaattttttgtattttcagtagagacggggtttcaccatgttagccaggatggtctcgatctcctgacctcgtgatccgcccgcctcggcctcccaaagttcctgggattacaggcatgatccactgcgcccagcctaaaaaaatttttaataaaaaaaaatatatatgtgtcaactgagaaatactattcagcagttaaaaaataagaagaaaaggccgggcgcggtggctcacgcctgtaatcccagcactttgggaggccgaggcgggcggatcatgaggtcaggagatcgagaccatcccggctaaaacggtgaaaccccgtctctactaaaaaatacaaaaaattagccgggcgtagtggcgggcgcctgtagtcccagctacttgggaggctgaggcaggagaatggcgtgaacccgggaggcggagcttgcagtgagccgagatcccgccactgcactccagcctgggcgacagagcgagactccgtctcaaaaaaaaacaagaagaagaagaatgaggccaggcatgggtggatcacacctgtaatcacagcactttgggaggccaaggcaggaggatcgcttgagcccaggagtttgataccagcctgggcaacaaagggagaccccgtccctacaaaaatgtaaaaattatcagcctgggcaacataggaagatcccatctttacaaaaaaatttaaaaattagccaggcatggtggtgcatgactgtagtcccaactccttgggaacctgaggtaggaggattacttgagcccagaaggatgaggctacaggaagctgtgatcctgccattgcacactccagcctgggtaacagagcaagaccctgtttcaaatttaaaaaaataaataaaaagaatgtactattaacatatacaacataaataataaatctcaaaaacatttatgttaaacaaaagacagtatacgaactatatcccatctgactacattactaagaaatccaaataaaggcaattgtgggagaggggagtggactagaaagcggtaaaagggaactttctgagagaacagaaatgctctgtatcttattttggatgctggtgacatgggtacatacaattgctaaaactcactaaataggccaggcgtggtggctcatgcctgtaatcccagcactttgggaggctaaggcaggtggatcacgaggtcaggagttcgagaccagcctgaccaacatggtgaaaccccgtctctactaaaaatacaaaaaaactggccaggcgtggtggaggacacctgtaatcccagctactccggaggctgaggcaggagaatagcttggacctgggaggcggaggttgcagtgagctgagattgccctactgcactccagcccaggcaacagagcgagactccatctcataaaaaaaaacaaaaaaacaaaaaacaaaaaacaacaacaaaaaaaaaaccctgactgaattgatcttaagatgtttgtatgttctgagacgaagttttgctcgttgcccaggctggagcacaatggcgcaatctcggttcactgcaacctccgcctcccaggttcaagcaattctcctgcttcagcctcctgagtagctgggattacagacgcccaccaccatgcccggctaatttttgtatatttagtagagacggggtttcaccatgttggtcaggctggtcttgaacttctgacctcaggtgatacactcgcctcggcctcccaaagtgctgggattacaggattgagccactgcgcccagcgcaagatctttgtatgttatgctatgttaattaaaatatgtatatttttacggaagtcttgtcatgtgacgcctccacttaaaaccctttaaatgattatttgtcaccctaaaataaagtccaaattccttagcatcactcaaaagtctgttacaatcttatcattctctctccctaaaccactctcctccttaaagtgccagcctagcagttctaaaggtacggttcaggaactccccagggtccccaagacctttcagggggtctaggaagtcaaaattatttttaaaatactactaagatactgtttacctttttgctctttttctctcacaattgtacagtggattgtcctggaagctccataacatgtgagaatatgatattattaaatgcatcaacaactgtaatatctatataacttagtcatggatattgtccaaattaccaattcatgatgtgacaaaaatcatgcatagataaaagatctattcaaggtgcaacaaagagaccagttaattttatttcattttattttttattgagacagagtcttgctctgtcacccagggtggagttcagtggcatgatgttggctcactgcaggctccacttcccgggttcaagcgattctcctgcctcagcctcctgagtagctgggattacaggtgcgcaccaccacacccggctaattttttgtatttttagtagagacagaatttcaccatgttgaccaagctggtcttgaattcctgacctcagatgatccacccacctcagcctcccaaagtgctgggattacaggcaggagccaccatgcctggccaataatatatatgttttaatatttgaagaaatttattctgagtcaaatatgagtaaccatggcccttcaggaggtcctgaaaacatgtacccaaggtggtcgggtgcagcttggttttatacattttagggaggcatgagatcaaatacaatcaaatatatttaagaaaagtctcaaaattttgaagactgtaaaggggtccagggactgagcacagtggctcatactcataatcccagcctttaggaggacaaggaagaaggattacttgaggccaggagttcaagaccagactgggcaacatagtgagaccccgtttccacaaaaaatacaaaaaaagaaaaaggagaaaaaagaaaagaaaaaggggtcctgagagcaaactccttttctctagccataccaaattattttcagttcctgaacaacattatgtgatttttgcctcccaccgtgtacatatgcttttctctgctttgcacacacactctcctcaatgtgccggctaactcatactcaacattcaggtcttggtttaaacatcacttcctccacaaagccttccttgattgttcacactggactgggtgcctttcccatgtattcccatagcaaggacagtcccaacttaacaatggttcaccttacaattttttgactttattttttaattttatttattttactttttgagatggagtctcgctctgtcaccagactggagtgcagtggcacaatcttggcttactgcaacctctgactccctggttcaagcgattctcctgcctcagcctcccaagtagctgggattacaggcactcgccaccatgcccagctaatttttgtatttttagtagagacggggtttcaccatgttgtccaggagggtctcgatcgcctgacctcgtgatccgcccacctcggccttgcaaagtgctgggattaaggcgtgagccaccacaccccaccttaatttttcgactttatgatggtgtaaaagagatacacattcaggctgggcgtggtggctcaagcctgtaatcccagcactttgggaggccgaggcagatggatcacttgaggtcaggagttagagaccagcctggccaacatggtgaaaccctgtctctactaaaaatacaaaaattagcggggcatggtggtgcacgcctgtaatcccagctactcgggaggctgaggcagaagaattgcttgagcccaaggagatggaggttgcagtgagccgagatcgcaccactgcactccagcctgggggacaagagtgaaactccgtctcaaaaaaaaaaaaaaaaaaagagagatacgcattcaggtcaggcacggtggctcattggaggccgaggtgagcggatcacctgaggtcaggagttcgagaccagcctggccaacacagtaaaaccccgtctctactaaaactacaaaaattagctgggtgtggtggtgcatgcttgtggtcccagctactcgggagacaggcagaagaatcacttgagcccaggaggtggaggtcacagtaagcagagatcacgccactgcactccaccctgggtgacagagtaagaccttgtctcaaaaaaaaatatgagatacacattcagtagaaattgtacttcaagtgctcatacatgtaagccattatcctcagtgaaataactgaggaatagaaagtcaaggaggttgcagtgagctgagatcagccattgcactccagcctgggcgacagagcaatactccgtctcagtaaataaaaaaaaagtcaaataccacatattctcactgataagtgggagctacacaacgtgtgcacatatagagtgaactaacagacactggagaatataaaaggtgggaaggtgggagtggggtgagggttgaaaaattacgtattgggtacagtgttcactactagggtaatgggtatactaaaagcccagatttcaccacgatgcaatgtatgcacataagaaatctgcacttctggctgggcgtggtggctcacgcctataatcccagcactttgggaggccaaggcaggcgaattacctgaggtcgggagtttgagaccagcatgactaacgtggagaaacccagtctctactaaaaatacaaaattagccgggtgtaatggcatttgcctgtactcccagctacttgggaggctaaggcaggagaatcgcttgaacctgggaggcagaggttgcggtgagccaagatcgcgccattgcactccagcctgggcaacaagagctagactctgtctcaaaaaaaaaaaaaaaaaaaaaaaattttgccaggattggtggtgggcgcctgtaatcccagctacttgggaggctgaggcaggacaattgcttgaacccgaaaggcagaggttgcagtgagccaagattgtgccactgtactccaccctgggtgacagagtaagactccttctcaaaaaataaaaataaggctgggcggccgggcacagtggctcacgcctgtaaacccagcactttgggaggccgaggcggaaggatcacgaggtcaagagatcaagaccatactggccaacatggtgaaaccccatctctactaaaaatacaaaaattagctgggcatagtggcacacgcctgtagtcccagctactcaggaggctgaggcacgagaatcacttaaacctgggaggcagaggttgcagtaagccaagatcacgccactgcactctagcctagtgacagagcgaaactctgcctcaatcaatcaatcaatcaataaaaaataaggctgggcgtggtggctcatgcctgcaatcccagcactttgggaggccgaggtgggtggatcacctgaagtcaggagttcgagaccagcctggccaaaatggtaaaacctcatctctactaaaaatacaaaaattagccgggtgtggtggcagacgcctgtaatcctagctactcaggaggctgaggcaggagaatcacttgaacccaggaggcagaggttgcagtgagccgagatcaagccattgcactgcagcctgggcaacaggagcgaaatcccatctcaataaataaacaaacaaacaggctttgtgttagatgatttttcccaactgtaagctagtgtgttctgagcacatttacggtaggtagatggccaggcacggtggctcacacctgtaatcctagcactttgggaggccaaggcgggcggatcacaaggtcaggagttcaagaccagcctggccaatatagtgaaaccctgtctctactaaaaatacaaaaattagccaggcgtgatggcaggcacctgtagtcccagctactcgggaggctgaggtaggagaatcgcttgaacccgggaaacggaggttgcagtgagccgaggtcacgccactgcactccagcctgggcgatagagcaagactctgactcaaaaaaaggtaggtagatgacctttggcaagttatgtgtattaagtacattttcaacttatgagtggtatatcagcacatcaccccattgtaagttgaggagcatctgtactctatcctaacctttatcataaacccatctagtgactgcttatttacatgtctatattacccactaaattttctgtgtactgacatcgggttttgttcacagctatattccccaggggctaagcactgtctggcacataaaagcattcatgagtatttgttgatagaataggtgaatgtaatcctctttttttcttttgcttgttgttgtttttaatagacggagtgttgttctgttgcccaggctggagtgcagtggcacaatcagtgctcactgtagcctcaaactcctgggctcaagcaagcctcctacctccaccttctgagtaggtggggccacaggcctgtgctacctgctaccactcccagcagaataagtgaatgtaatattcatcacaacaaatgaagtattatttttatgagaacactgaaactcactgaaatgatctgttcaaacagatcaatctagaatcttactctttcatctagaaagagtaagctgacaattgtacaactgcaccccaaattgtgtttgtttgtttctttcctgagacagggtctcactctgttgctctggctggagggcagtggcaggatcatggctcattgcagtctcgacctcccagggctcaggtgatcctcccacctcagccttccaagtagctgggactacaggggcaccaccacgcaggggtaactctttgtatttttgggtagagactgggttttgccatgttacgcaggctggtcttgaactcctgggctcaagcaatccgcctgcctcagcctcccacaatgctgggattacagccatgaaccaccggggcccaaatgcactccaagttttttacccccagaactctcacttcttggtgggggtttgcgggaagcttacctgggaactaatggcatacttcaggtaggacaagatgagaggattgggggatggtccaatcatggcctgctctagtaacgcatctgcaagaggaatagcaaaacacaactgagtgattacaacttctctgggtttatccctcccatctttctttcccagttcacttgagacctgccaggttgagaatatcccaggtggctcctttaggaaagaatttcttcatgttgattgcccattggtagtcactccagcgctccttccaggcttgcaaaatggcttgcttcaggttgaccaccttcattatttcactctgagcaggtggcagcggtggcggccagctttgaggtgaaagaaatggagctaaagaaaaggacatgaggttctaaggagaaccggggaaggcagaattaaatagaaaggagaagatgcgggaagatttaagcgagacagaggaatttgaaagaaaaagagctaaagggataaagtaagatcctgtcagactctctcctcctgaaccgcccttccttaaactggggcactaagaaagtatcggccgagcgcagtggctcgcacctgtaatcccagcacttcgggaggcagaggcgggcgaatcaccggaggtcaggagttcgagactagcctgaccaacatggagaaacctcgtctccactaaaaatacaaaattagccgggcttggtggtgcatgcctgtaatcccagctactcgggaggctgaggcagtagaatcgcttgaacccgggaggcggaggttgttggggtgagccgagatcgcaccattgcactccagcctgggcaacaagagcaaaactccgtctctcaaataaatgaataaagaagtatcaaagggactaatagattaaacagggcatcaaggagttaaggcagtcctggttgcctaattacgcccttagctctaaaagcgtcccttggccaccaccattccaagtccagatttgctccctcatttcctccaccttctccagccctgtaactatacctcccaatttccttttcatccaccacctccccaaatttaagcctaccgcacaatccagttctaggtggtaggcatcgccattttggcacttgtcaagaagctcactttctattggctgggagtaacaaacgccaaccaatagaaatgcagcaaggaacgccccgctgtcttctgggaatggtagttccttggactgaaaccgtatttgtctgcgccggcgaggaaactaagggactcgtctagtcggcccgcattgttcttctcctttaagggaggacatccaggagctgaggcactacagagactcagggactcgagggagctcgaaaggccgctcacaacccggcgtcgcccacgacgtcactgtcgaccgggcttctccatcatattccgacaccctttcattcgttagcccctagttagtaggtgcggcaagggtgtggcgtgggggcaagggtgtggcgttcagcaataaggtctttctcctttcctgggctctttctgttctcctaagcccctggagctaccagagctattctcatttccacaactatattctaaaagcgacaccgaggtgccttagttgcacacatatcaccgtccccgaatcttacagtcctatcagaatctccaggccctccatacagcttggatacaagggaaagtaaagaggaaactaaggtgaaggtgatcaaaatcaaaggaattctgagaaactgtcacaactaagagggctaaggagacctgatgactaaatgtaatgtggttttctgaatgcgatcatggaagagaaaaagaatactgggtaaaaactaaggaaatctaaataaagggtggactttaattaataataatgtatcaatattagttcattagttgttacaaatgcataatactaatgctaagatgttaataaaaagagaaattgggtgcagaatatgtggggaccctctattaccttccatttttttcctgtaaattaaaaacttgtttttttaagtttcttgttgttgttgttgttgttgttgtttaaatcttgcttatcccaaagatccatatataaattatgcccagggctttggccatagcctttccttcccccagtgagaaacccgaaagcaaatgttacccacctctggaggctccaatgtctgagccttcttatgcatagccctcatccctccccatgctatggactggtcatccctaacatttacaaccaggaataagagtaaattactcgggaggctgagaaaggaggatcacttgagctcgggagttcaaatccagcctgggcaacataatgagactctcagctctaccaaaatacataaataaataaacatggaggcctttagccagggcccaatatcctagttcacaagttcaagctcaatctgtattcctcaacaaagattctttttttttttttttttgagatggaggcttgctctgttgcccaggctggagtgcaatggcgcagtctcagctcactgcaacctctgcctcccaggtttaagcaattctcctgcctcagcctcccaagtagctgggattacaggcgtgtgccaccacatccgactaatttttgtatttttagtagagacagggtttcgccatgtcggccagggtggtctcaaaatcctgacctcagccacccaccttggcctcccagagtgctaggactgtaggcatgagccaccgtgcctagcctccaacaaccattctttgctcaccctttgagtggcaaaatcagtcctcgggaggataaatctgggagagcagcccacttaaggctctggaagcaaaactgtggccatttgggcagagaattacagcgccctgggtgtctggagaatggtctaaacagggagtcaagaacttctgttccaaaggggagagtgtggctgaaggagggtcagatcatgtcctcctgcggttggtactgcctatggcctttcttcctccccatacattcaatccacacccctctcttaggctccctttgtgcctgcccaagtgacaccattggggaatagtgtgtatacaaaacagctgccaaatatatgttgccaaagcttctaaagcaggaaggagggaaatacggattcctcacctcaccttccagatgacccccggccactccactcatacttgagactgccacaaaccctgcttctcctcagtctctcacatatctgacttcccctgttctcccaggcccctcactctacctttgcctgctcccctgctgtcattctgtgcctgtagccacagcctaaggccctccacctggagccattcctggatcatcctggagcccctgtcgcatacctcagagcccaaactgcctctcttggagagaagctgtcaactgtgtgtccggtccacacaggactggggactatttgggccctgaggatggtgatattttgagctcaaaccattccctctggcagggagcctggcagatttctagggaggtgcctcctccccacttcgcagtgacagggaggcggcttttgtagtcaggccatctgccttctctgtctccccacctcccaccagcagccctttctctaggcttggcaaggtttccccaaaggctggactcctatgtacaaaggctcccttagctctgggcaaggaccatttttagtttatccactttgacctccctgcctctctagtctgtaaacatcagaggcagcctttcctatatcacctcttccttccacaccacaatatcttcctagggacccccttgggctctctggctcactgcaagcacaggaccgggaccccatgataatcctccaaagggtgaagagagatgctaacatttcctttgggtgtacaaaaaaacagccccccaaccgggcgcggtggctcacacctctaatccctgcactttgggaagccaaggcaggcagatcacctggggttaggagttcgagaccagcctgaccaacatggagaaaccccatctctactaaaaaacaaaattagccgggcatggtggcgcatgcctgtaatcccagctgctcgggagatggaggtaggagaattgcttgaacccaggaggcgaaggttgcggtaagctgagattgcaccattgcactccagcctgggcaacaagagcgaaacttcgtctcaaaaaaaaaaaaaaaagccctccagcccatctcaaagccccgtcctacttaccccactttcttttgctgttcatttcctctcaacagggacaggggccgaactcccatctctgccctcctagtcctgagccccaacctctttcttcatcttgttgcctaccttggctagagagagaagaggggaaggtggaagtcaaccagtcagagtgatatggcaaccctggagaagtgtcagaaaagcagctaggccagagtggggtaagaggtggcaaggaacagggttctgggtacccaaagggaagggaacattccttatctatctaggctagaaaacagtataaagaaaagtggcaagagtccagacccaaaaacccagaaacactgaaatcgttggtaaagcatacaaggcacagagggtgtcagcttcccttctctccatagggaaactgagtcattccttttccctaagtggaacattttcctctggaagcttgcctgggtccccccactatgggcagcaggtggatgggaaaagaaagacagtcactcccaaacacttatacacagctggctccaaaccagtctcctcctcataccagtcaccaaatcaaaatccctgctttctgtctatctgggggagggaatgatgggaaagaggtctgcaaggtggctgcacctcagggactcagggactacccctggatcccccacagttgcctgtctctgtcttcccactgccccaggagagtgaaaggcagaatttgaatcaactcttggaatagcttcccctctaacaccctggaggatgccttccctctccatactcccagcacaaagagaagtgctgtgatcctgaggccgacagtggctgggaagggagggcagcctgccatttcctttgtatggcccctccctccaggccctgagagctgctctgctttatacttttggcttccatatcatactaccctatcccctcctttaactggagtgggagaactgcggaaaggtaagccccaaactctgatggtaaaggagacttccctgctccccctcctctcctctctcctgctggcaaagataggatgagaagactctaagggaaagtgaaaccagaagctgggagcatttggggaatctaatacttggcacatattaaatgcttaaaaaaaaaaagtgtcaggctgggtgcggtggctcacgcctgtaattccagcactttgggaggccgaggcaggcggatcatgaggtcaggagatcgagaccatcctggttaacacagtgaaagcccgtctctactaaaaatacaaaaattagccaggcattgtggtgggtgcctgtagtccccgctactcgggaggcttaggcaggagaatggtgttaacccgggaggcaagctttcagtgagccaagatcacaccactgcactccagcctgggtgacagagcaagactccatcaggaaaaaacaaacaaacaaaaaaaaaaaacagtgtcagattaatgaataaaattaggagaaaccctgaaagacagcctggaaaaggtgtcagcttccttttccatttctcacctcagctaccaaaagcaagactcagccaggcctggtcccttccctggctccctcttttgtgacccatagcaatagcgcctgatgggacaaaggggagaattaagtggccactttctcttaccaggtaattgctaatttgccagtctctcatctcctgcatcagcctcccaagtagccagaactgaaggtctgcaccacaacacccagataatttgtgggtttttgtttttggttttttttttttttgagatggaggtctcactatgttgcccaggatggtcttgaactcatgacctgaagagatcctcccacctcagcctcccaaaatactggtgatgtcagtcagccaccttgcccagcctgctctccaactttctttcctccatttgcaccactctttctgattgggaaacccctaggagggagaaacatctgagctttgagttctcttggctggtagtacctcagtttcctctgctgtctttccagagcacccccaataagttcagctctgtctgcagagtctagaggtatatgctggacatgtcatcacttgctgacctagggtccaagaggtcaagatgagatagaggaagggatttactgaggcccaggccacagagcttgttccatggtggctggtagaggggcctatctcctgtttccccaaactgctagagatgtgtaaggcttttgagcaggggtagaggatgctgtgtggagttttagctgccagactttgaaaaaaacctcttcagaaagatatctggataccttggttcctaggggtcgtatcctcaagaaatcttagggtgcttcctagcaacagtctggaaggaagggagggagagatggagggagagagggaggggcctaggcatggctgttctgatgggagcccagagaacaggctgttcctgctacctccttagcaacggaaatctcagctggaggggccatcagacatatcctcttggagggtctatccagccttattcatgccacccctaccctcctcatagattcggggaatgctctgaagcagaggtggggaatgggaggggacagccctggtggtggtggggggtttcatgacaaggacggaaaaggagctgaggatgaactcaatctgagaagagctagcagcttcaagaaatgggtgggcagggtgagtggggtgggaggacagatgaggcaacacagggacagtggctatacgcccagacacgggctggatcctggcacctggggagaggcctgctttgaaagcagtgtgcccttcactttgccctgcccagacctgtcaccagtccatactgggagcccaagaaaaagagagaggtaaaaagaagatgggggtggccggggacggtggttcatgcctgtaatcccagcactttgggaggccaaggcaggaggagcacttgaggccaggagttcaagactagcctggccaacatggtgaaaccccttctctaccaaaaaaacaaaacaaaacaaagcaaaaaaacaaaaattagctgggcatgctagcacatgcctacaatccccgctacttgggaggctaggacatgaaaatcccttgaacccaggagacggaggttgcagtgagccaagattgtgccactgcactccagcctgggcaaaagagcaagaccctgtctcaaataataataataataataaattttaagaaggagaagatgggactggtaaacccttgtctttgagtgctccactctgcccctcaggaaaaaaaaaaagtggaacaggaggcacttcattttctatggctctgggtttaggatttcagaaagtcgtcaccacccaacattatagggccttgcatcaaagagagatatggtggggaaagccagaatggaagagagacaaaaccgtagcaccttcctcctccccctctggacaccatcactcctgccctgatccagattaccgctggccctccccactgcctcctagttctgcctttgtgatgcagagtataaatgtatctcatgcattgggattccctcccagctccttgagcagcccaatcccaagggactagttccatacagggtagagtacagaccctgagcactacatactgcagccttgctccccagggttccggccaaacctgatcaccgaggaggtggcatcgactggcagacagccaccctcagtgcacctcattccactcactgcactgactctgcacactgcagcctcctgccccacactgcagctgttgcttgtctcctgtgagcccagactgaacacaggttcgcttactgcatggaggctccgtacgctgcagcctcaattccccattacagctgccactgcacaccacaggctcccttcacccatggcatgccctcaacaccaccactgcactctgcacgccataggtttcatcccagctgctcttctcatctccatggttccagggaccccaagagaggtaccctcccctccgccaagcattacgaactccagtaccccctgtgaaagaagtggttccaacagcactgaggatgcaggtggctgagactaagacatgagcaagggcagcccaacttgggtaagctgtggctcagaatcccacactcgccaagtgactctgcccagtataaactgggcgattagccgagcagctccccctaacacacacacacttacacacacacacactcacacacacacccctccccaagagcagactatgtagccagggccccaccctgagagccgtgggaaggctgtggcccccgctggtaaaactgggctaatgacagcaggggaaccggcggggccaggggggtgctggggtaattagggctcggcctggcgctaggagatcctgagatgaaaggtgctctggcgtcactgggttggttttatgtccatgaatgcaggtgtgtggtgtgtgtatgtgtgtgctgggggtggggctggcatggtggagacctctcctttgggttgggttagggggtccatttgtatgcagcccaccgtcttccttagattgactctggtaccatttggatttttgtgggagcaaacatggggggaaataccaccacccgggagctaggaattgagggggtatggcagatcttgtcccctccccgagctcaggagagggagcagattgttgggggaaatggctggtgacagagaatagaaagagcctatatggagaagggtgacgttggaaaagggaggcagtggatcggtattgatgttagaaatgagaggggagggaggtaacagggaatgaacccccacaaggatgaaaaacgtaagatgattgaagttaaaaggacatcaggggtcacctgcccagccctcgcagctgaagcttgaggaagctctgcccccgacagcagtggcgatttgtcaaggtcacacagtgagttaccggcggagaagggacccgaactcccaaacaaactacacctgcaagcgtttggtgtttagactttctccccgatgtataaggtgcaggctgctcgtcgatacttcctcctccaccctcacggtgcacacccgaaaaccccccaattctcccggcaagcaaaggctattttttaatgacatcttttccaaaatatgtcaccaagtacccactcctgcgggagccgcccgggctggggagggcgagtccgagcggggcggggcagaggcggccgaggggcggccggacctctggcgggggtcccggggcgcggcagggggcggggggcgggggcgggcggcggcgaggcggcctgcagggagcagccgcgagccggccgggcgcgccgagcccgagccccagccggagcggggcgggggagggaggagccagagcggccgccgcctctgccggaggagccgcggggccgccacactcgccccccgccccccccgcgctcactcgcactcacacccgggcgcaggaggcgggcggcccgggccccaccggccccccatggacgcccccagcacggggcgctgagacccccgcgtcgctgcccagcccggtccggcgcgccacgccgaggtaaggaggagggagcgagggggcattaatatgcaaatgccttgcgattgattatgcaaagccgcggggctccgtggccagctcccaggcgggctaggggcgcccagggggtgcctgctgccagcctcagcctttcctggcgccccagtgaccctgtcacgagcccgggagcttgcaactgacgccctggggaagggaggtgttgctaggaggtcgctgggccccggggttcgcaggcggagatggcgtccgagcctccccctggagggcccgcccggcctctgtccggccagtctgctgcgcattcccgggccgggccccgttgccggccgccggagctcccccgcccgccgcgccgcggtttgtttacggtgcgccggaggcctgcccccccagcccccacccctagcctctgaggcccgagtggcctttgcaaagctgcctccagctgcggagggcagtatgagtgcggtggcgcgggtgggcttgcacgggtccggggagagggaagttcccccgcctcacccgcctcccggttgagcatggctgtctggttgcaacactgctaattgcaaaaacgcggttgttgggggggaatgtgtgtgtggaaggggtgtacttggtggtgcctagatgattaggagagttgctggctggggaggagagggagaaatggacctgtgtgtgtgtaccccaccttgtttccctccccttgcaacgtgtctctggtgccccttctccatctggggccctcccttgtccagcgtgaaagaaaggcctggggggatgacaggggcaattgaaagaaccaccgttccaggggtgggggtgggggacacagaaggaaagccagtgaggtgggagcctgcccctcagtgctggctttggctccaggagggggaggggatgaagggggctgttgtccaaaatgaggggggaagcaaaagtgacacgcagacacagagatatgtccacacagacagccacatgcacatccagggacacccaggcagactcaaggacaggagctactggacacacccacatggggacaagggaagagacaggctgctgctgcaccgtggagctctgaggggtgggatatacccatgggagaccaagagcatggggaccgatccatgcacatacccacgcacagggtcacacgtagatgctgtcacacactggggcaaggaggagttgctgtcacccacacataaaaagtcactgtcacatgcatgcatgcacacagagcaattgcacacagcagcacaattacaaaagaccctgtcactcacaggcacacacgtgctcgcatgagcccagtcacacagacatcattgcttgccgtgacagtcgctgtcactcagtcagatgcaaacacagttacacaccaacacatgtatacacaacttagcaacaagtattttcctggactctttactgtggagctctgaggttctgtaggcaacaaaacccttgctcccaagaatattaaatttggctgtatgaaaaagtgttcctgcgtaatggtgtaaagcatgcattcccaatgacatgttcttggtctctatcgcttgagataccaccctactagacagtgagctcttggagacctgggagaatcacttaaagagctctggatcccacgcagagcctagcacaagggctgctctgtaaatacttgttagttgattgactgtggaacctgcagacacaggtgcactcatttgcacatggtcccctgaactcaggtgcagaatgagttcacaaggcccaggtccccacagttgcaggtccacaccaacagtcgtgtccacacaaccccagatacacacaactgcagcctgtgcagccgagcacacacttagatgcacacaatcacaaatttttccccttcagcttcctcctcccctttttcctctaggctcagccactgtgcgggaatgggctgttttttttttctttctttcttttagagggacagagaaacaagagcaaagacagtgggttcaggggggttccagagggccgagtcatgggctcaaagcagtgtccagtgacttctagaagctaggattctcttgactgttggggaaggggagagctgctctcctccctaccctaaaagctcaggggtgtctaactgcccctgctctgagtcatttgcctgggtctttcctgggaacagtcagtcacttccagctgagttcctgcgccccaccttgagtctggccctttttcccacctgtaccctcctgtccaaacttggaagctttccttaagaggccatcggctggcgagtgtctgtgtgagtgatatgtacttttgacttggaatttctctctaactctgtctctctgttgctctgtcttgcagtgtctgattctccctctctctctccttgtttctctgccagtctgtaactctctctcaccctgttgctacccccgatctacccctgtccttgtctcagagctggggactggcagcaatgttcttcatacttttccagttgttaatacccaagctccgcccctctgccccccctgcgcagcctctggggtcagcttgaggttggggtggggggcggggggctcagctggctgctcaggacttcctgcacttccttagtgccgcagctgtggccagcaagttttaggggctgggaatgggggaagggggggggggtcagccactgcccatgctgacccctcgggcctgcatgtctggagacaccagttctgtgggcaccctcagggtgcaggctgcagccagctagcagctcttaaacaagccatgaagaggctccccccacactggcccaagctggaaaagaaccgcccccatgggcagtggcgggagctggcaggaccctgctgagttgggtccactgcagggctcacaatggcctttctccacacccctggcagctgaggcccacctcagagatgcccaacagctgtgtcctttttgcccagcctcagggcctggttctgagggcacagctgcctagactaagtatgtactaagcgaggccctcccacccgtgagtgcaggttccagcctagaaggggtacctcttctggagagggaatttgaggagggggaactcaggcaggagacatcgagcccgggggcaccaagcacttctcgctatgctcccctctagccttggactatttggaggtggaggcacttggcagagaacccacagggcagctacagaggggaaagactgaggcttggtctcagggaacacatagctggatgaaagaacaaggcattgggccgggcacagtggctcacacccgtaatcctagcacactgggaggcggaggcaggcagatcacctgaggtcaggagttcaagaccagtctgaccaagatggtgaaaccccatctctactaaaaatacaaaacttagctgggtgtggtggcggggtcctgtaatcccagctactcaggaggctgaggcaggagaatcgcttgaacccaggaggtggaggttgcagtgagctgagattgtaccactgcactacagactgggtgacagagcgagactccgtctcaaaaaaaaaaaaaaaaaaaaagaaaaacaaaaaagaacaaggcattatctatcaagcaggtgatataccatcacagctaagaacagagatgatggtgatgatcatgacggccatgattgacctggactgcctaggtctgaatcccagctctgtcacttgctggatgtgtgactttgagcaagcgatttaacttccccgttgcctcatctgtaaattggggatgatcatatctacctcatttagcttttttgaggaaaaatgtttttaaaagtgcctagttcataacaaactgtatatgtgagcggttgtgatgggtgaaggaagctgtgggcctggggtctcccagatttcttagagaagcttcgtggagaattgggtctcctagacatcagtgagactggggcctggggcagtgggtctccaatttccagccttctcaccgtcatgtaatcttttcctcccagacaaatttttgcagcctggaatgagtgtatgggaaagagcccaaggcaggcccctctgccccaccctcctttgaccctcgcccttcagcttacaaggagcccttggcccctcagcctgggacacaccccaccagctaggggcacctgcataaatctttgggcatcactgcatctctgttcagggtctgagctctgggggtgggagagagagaacaaggaaagccgtcccctctcttatgtgtgggctcaaagaggaggcagtgcccttcctccctcctgggagcccagcattggtcaaccaggacccagctctggctgataggcaccagattcccctgccctccatggagtggtacttagtgtgaaaggtggtggcagagagaaactgaagcactgagtaatgaccagtgtggtgggcacagcactttgagatccagcatctgtcctgggttgcctctttgcctttgtgagtctggtgatcaggatcccctctccaaaccccttttatttagccctgcccctcaaggtgaaggaaggacaatgggaggataccctgtaggggtgacgggaagcctttggagtgggaaccaatctcaactctagttctcggctgggcacagtggctcatgcctgtaatctcaatattttgggaggccaaggcgggaggatcacttgaggccagtagttcatgatcagcctggtcaacatagtgagaccccatctctaaaaacaactttaaaaagttagccaggtgtggtggcgcatgcctgtgttaccagctacttgggaggctgaggccggaggatcgcttaagcctggaaggtcgaggctgcggtgagctgtgattgtgccactgcactctagcctgaacaacagagtgagaccccccacacacacatcctctcaaaacagacagaaaacaaaacaaaaaacccaactctagttctcatggctgcaaaggtgtctaggggactttggagaactgttgtgtctcttggggagggaggcaagcatgaccgtggtgggaagatcactggctgggagttgggaggcctggctgttgacattcactagtcgtatgactttgggcctgggttttcattatctagagacaatggttcctgtctcactcaggttgagggcaaataacacaaggtgggatgacccctgtgttcaatccatgttgcatcctggcatggtgagcaatgcctgtggattctccttttttcccagggcctggcacatgccagggtggggcatacacatgctgcctggaaccagagacagttctcagtctctcactgaagtatctggggctggtgtgtggtgggggcacatgtggttccaccttggtgtcacttggcaggccaaagctggggtcatagggacctccctccggtatgccattgcgtgaggtggtccagagggagggtcagaagtttgctgggtagacaagggaagcaagatgggtgttactggtgcccaggaaatactatccttgcttcgctgttttgggggtgggcattaaaggttgataccaaagcctcagccatgcccctcagcagtggccaagagcagaatgattggaccaagcccctggcccacctcctcctcctcctcttttcctcttctaaagaagagatcggctcttggctcccagagccccagctgcctgtttctttttctcttttaccaggcatgggggtggggaaacaggggaaccgaggctttggtgtctttcggcatttttgtacacatcagtgagtgggtgtgttgtgcacgcatccatgtgagagtgtttttgtgcatgtgtgggctggggagggctctgaatatctcctggaacggtacccagagccctgtggctctgcgcatgcggggtgagtgtgtgtgtctgcacgtgtccgtgtgtgtgccggagactcagctgcattcacgcgcgcgctctctccctccctctctccctccctctctctctccctccctcccttcctcttccctctccctctctctctccccctccccctctctgtctctccctccttctctccctccctctctctctctcacacacacactctcaatctttctctcttccctcccccttcctccctccttcctattccctccctcctccctttctgtccctgtctctctgtctctgtctctgtctctctctctctgcctctgccagttctgcttggttaggggctagctccagcctctggggtgcctgggagaacatccctccctttctttccccctccaccattccctcccctcctaggccatgctcttcagggcttgcaggcaacttcttctactgccttagatgagggagtgaggagggaggaccccaagccttgtgcccatggtgccatctgcagcaagtgccttggccccgtgacattcatgcctccagcattcagctgccccagctcccagctccaattacccgctggctgctgggggagggtggggagaatgtgccgtgcccagcttgggggtgctcctgcttctgctttcttggctacttggatctcctgcctccattcctgaggggaattgggcagggggggcgtgaagttctgtgggctgataaggaggggctgagttctccagcatgggtgtgggcatgaccacccaccagtggtcatgggggatggatgtgacctgggaggagacctccagacctgggcacccaccttgatgcctggctggagctggcccgggcaggaggagggagaggagagcagcaggtgggtgaggctatgggggagccgagtgggaagcagtctttgatgttaatactgggcatctggcccaagtcaaggctgctgtttatgtctttctgtctctgacctgcagggggggtttcctgttatattcttttggggcggggtggggaggatcctttgtttaagtaaccaatctcccccttatgaggatccccaccccatctcccattctctagcctctaaggtcccacagtggctaggtgatgagtcactgccccccagctccagaacctgtctcctgggggcccagtgagagctcaccaaggggtgccgcctcccctcctcccgtctcccccatgcctgccaggctggggccctgagtctgtgtgtactcctctgccacatcacacctgccaaatagtaccttccttcccgccttcactcctcctctccttcctggcactaggataacagagagttgggtggggcagccctgctcaatccatacctgagaatagaacagggggtatgggaaaggacagggagtcccggtcctagagaggcctctgcccctcagcatgggggcacatgtcgctgctgcagcactgccaccaccacagactcccaggggcccttggtgtgggtggctgcctgtggtgcccgtgttggcatggggggcagtgctgcccatagacgcctgtgcccatgcatgcccatttatgtgtctgggccacggtggccgccccggcccctcagcatcgcccttcctggctcccatggtgggaggctgggtgatcaggagtgggtggtgggggagggatctccccccaccctagcagcaggcagaggggaaggggagagggaggtgtgaacctacccacagaactattaatagcccacatgccaggccaccaagaaccagctgtcaccgtggaaaccattcctacgcccccctccccccagcctgcatggggtgggacttagacagggtacgaagccccccacccatctttctttgttacctttctctctttgtctcccctccttcatgtgtctctcctccctttatctgtcctcctttctacctcaccccttctccccatcccccatctctggctcccctttcttcctctccctctactgccttgtcacccctagctctaccccagccctgtcccatttctttgttcttccccctcctcccttcttccctctttcccccaccagcctttttacccctcctcccatctttccacccttttctcagccgccccgcatgtacgtgtccctgtggctggcaaggagggctgggctttcttcagagcactaaggacaaagttcaggggccccagaaaggtggggccaaagcccagagcagatacgcaggagggttaatgcgggtagtattgggggttagatcctggggacagaaactcccctctggcagccccaggagtcctttgggggtgtcctcagatatacaggactgcagagtgggacggctcggcagtgggaacctggcggggcgcccgtggatgccgcattggccccgtgtccctgtccccccatggcagaagtacttaagcttaatgaaatgcttccccctccacgggcactttgcctacactgcctcccagcagctcttatctcacaaggagggagtgggtggccaggccagccgacaggtgggtcttgctgtcctgctgtccagcctgggcacagaaccccatagctccgccccctcggcctccttggggcagggcctccctcgcctctgcagaggaggtaccaggaaggagtttggggagttaagctggactctggaggaggggtgagaggctgcccttcagggtgggtacccctgccccatgccccttacccgctgacctttttctgtccgtggctaacacaggctcatgtggtatgtgtctccccacatgctgggccctctgcctcgcctctgtatcaccccaaaggcccaagtgtgtccctggagagatgccaaggagtccccaggggttccagcctctttctgggtacccagtgagggtgccctaggcagcaagggcagcaccttgctcctctgcccactaccaggggctgactgtagctgggctgcactgcccagcaccagggcaccattcagttcaaaagaggggtggggcagagagcgagtctgcccctccccccagtgggcacgtgcaggcccttggcagtacccagacacatttggagttaaggctgggcaggagagagggatggggaaataaacatggtggcttaggttggcactgctccaggtctgcaatgtagcaactggtaagtggcaggggcctgggggaggggaccctcaggagccctggcctggggcaggagctgcccatgccatgtggctgccactggtgttccccgcctggcccggcccacagcagccagtgctcattcctgcacacactggtcctcctcggctgcccccaggacctgctccccggggctgcccctctctcagcatgcccactcctgtgcttgcctcctcccctccctgggggcgcttgggcctccggctggcgagtggatttttccagcttctgtaaacaagtggtggcagtgtgccaggcgggcaggagacaggcgggggcagcaccacagccagggtgtgccaagcaccgaggcacagcctggggggcagacggagacacccagacccggagagagagacattcagacacagacagacagacagacatgcaggcagcctcgctggacgtggagtcagaagatcgtcctctattgtccagcccaacccccgtagcggccctcgccccctgcccctcactgtctggctgagagcattaggccccagtgcccagcccctgggcttccccacccactccttctcctccccaacctccaccccttagggctggctacgccattataaatttataacaggaatttctccacaagccaagaaaaacttgacctactttcttgatggctccctgggctaaggctccctgctcatgcccccccaccccagtctcctgtccagcccccagtgcccagtcctggtctggggtgggtatcagaggtagaacgggccacttttctgtgcaatgcccatgctctccacactaccagcttgcctgggtgcagaggccccgttctgctgctggccctgcccaatcccctgacttatctccctctctcttcccaccctggctgcttatcagctcctgggggtggggccagggggcctaggggtgaggtctcctatgcagcagccacgtgacagaggttgaggtcgtatgttggggagctgtaccctttgtccccctcctacccgccacacctgcctgtgtgcacacagacagtaagccacaggtctgcagcccagggtcagaggtgcaatgccgtaggaatggtgggcccggcttggcactgccctggactccaggtagcagaacaaggctagcattagggccaggctgtgaggcttatcccacagccacctgcttactagttgtgtgaacttgagtgaatgaccaagctttctgagactcagtttcctcatctgtgaagttctcgtgccctctttggagggtacagattctctctccagttaatatgtgttagtttcctttcctttcccccttgccatcctggtcgatagcagctcagctaaaccaactgagaagtctggtcctctgcctgggaagtgggattcgagaccttgcgtgggaagctctggagtccctgaggggccagagttggggatcataacttggctggcagcatgggaggtcagttccctacagctttcaacatctctctctattaaggcacaaagatgggcattcatgctcactgcgtgccgctctatgtcccatccttccttcacagataccctccctgcctatgctgaaaactgcttgtctctggtcccctcttgcccctataatacagatgagtttcaggaaagcttttctagaggggtggtaacaatagctagtgtttaatagttgctcattaagggccaggcatttgtctgaatatgaagactgagacatattacttagtacatgaatgatctcattctctccctccattccttcccatgtctggggcttaggaggtggatctccaatctcgcctgctgtacctgttatctaagggatcatcctggtcccctctctatgcctgcccttcctgccccctgctgtcttgttatgggatcccaaagccccaaatgttgccaccaaagggatcctacccaccttcctaccgtgacaccttcttacccctgcctctctcttctctccacagggatctctggacaggacaagactccgaagctactcccccagcacacagcccgggacccacaaacccagcttgcccccagccctcccacctgccactccctggcccctcccaccgcccgccccccttggggcgcagggcatggtgtgaaaggccaagtgctgaggcgggtatcatgggtgctgtgccctagggcctgggtggcagggggtgggtggcctgtgggtgtgccgggggggccagtgtgcccaccccagtctcttggcgtgctggagggcatcctggatggaattgaagtgaatggaacagaagccaagcaaggtggagtgtgggtcagacccagaggagaacaggtaatgggttcagcaactaggtcatgccaactcctaagcagcaggcatgggcacctggctgagctctcctttaggcaccgcctttaagcacctctgtgggatggacgtgaggccagcaagccttctgcctacctttgtctggcagatgaagtcatgttcagatgtgacaggcacttggattgagagatgctcattttgaagcggggagcgatacagagcaattacagggagcacataaggggctcttccctagacattgctgggcagtctcagatgcccccaacgtcccttccaccattgctgcccttaccttgagcatgtgggatccaaacagccttgccattttcttcctctccctaccagcccatttactatctgaccacaagtgtgttgtccacaagctgcggttcacgtaatacatttcagggcacatgcaccagtaactattggtcatagcccaagcttatattcggaatctattgggagccccacaagctcttccttgttcatggtcaagggcgggcactgcgatggggctcctcccagaaagtgcacgccaaccatgatggttttgcttccacatgggtgaggtgtcagccctgcacatacaccaagggatggttacctgtgatctgcattgcccttgaggagcccagagggtctctgtcttttctatcagctccaagtggcacagagctttgtcccagttggcacggtgccctgggagctgggtacagcctgtgcctatggccagggagagggtgggggtgggggtgctccggggagcagtgtggctgactgttgcctaggagatcagatcccgagccaggaagccagaggcctggccaggcaaagccctaaggcccacaactgggtccctggagggtagaggaagtagatggaactcacagctgggcagggcatggggtagctcccctcccccaaagcctcaccccaggaaggactctgaggacgatctggcctgtcgctgtgtggctgtcacttgcagcccctgtgtctcccagcttaggcttctgtgggtctggaagagtctgtgcttaatgtttggagaaaggcaggaatgccagttcccagtctcctaagactgcaacccctcccccatcaccttcccctcccccatgtctatgcgccaccttgtggctatctctaggactacactcagaggctgtgagtctggtggtaactgctgaagccgctagctcaactggggcctaggtgggctgagttcccctgcacccaaccctctgggaggcgtgagggagacctgacctttcagcctcataggaagtagaccggagtaatccccacggggcgtggagcatagggttgtctgtgactgtgaccctggccaaggtcactgtgtcagtgtgttgggagctgcatccggctccaggaggaaggggcctgcaacatgccacacgcagggtgggtgcgggaggttatacaatccttgcatgcatgtagagggcttatgtaacctgtgtgcaccgaggttatgcaacatgtatgtggagagcctggcaacatatatgtgcagtggctgagggttgctaataatacgctgcacagaggggctcagtcccggctctgactctagctcatggtgtcaccaggcacaagcagggtctcagtttgctgctctgttaaatggaggctgtgcagagggtgtagtgttttctattgctgtgggttatttagcatgtgtgtatgacctggagctcaagcaacacgtgcacactggagggatgagggtggttttatgaggtgcctgtgcagagtgttgtgtaacacatgggcatatcctagaggttgtatagcacatttaagaatgccctgaaaatttcacaggtatgttggccctggtgcatactcaccatccatgggtttatagtgaaggttgcatggttattcatctgtgccggtgttatgttgcatatgtatgtgtgtgttctaaaggctacatagctttaagcatatcctgagaattcttccagcgtattcgtcatgtactgaaagatgaggatgtcctgcagattatgggtgcttcaggtcttctggcgggtgaatgtgtgtgtgttggggctctagaatatgcttgtgccacagccaagccccttatctctctcccctgcaacttccagataactggacccttttaagcattgtcagctgaccctggggggtgggaggtagaatgaggacacaaaatggaaagaatcaggccttgggggattgcataagcctctcggatgagaaaggggctactcgaagactgctctgtgattctgcccactttgcctccatccagtgccaggtcaccagatggaaagcgaaaaagaaagaacggccaatgttccctgaaaaccagcatgtcaggtgaggctggctgtgcgtgccccttctccacgtccccaaccccaccaaacccagccagggctcctctggacctggatgtggaacagtaattcatgtgttccctggggggagcctcctagagggcttgggatggacttgtctgggggtgagaaaggtaatgtgggatgtgcccagcttttgagggtggattaggtcaggacggcctcttccctcttcccctaataccctcatctgaggccctaccagaatcagggcctgagctgaaggactgaggggctgtattatccccagtgagcagctgacgtttatttttccctctccaccatcctctgccttgtagatagatcaagaagaaagccctgaatgggcagtcagaagaactgagattcttcatactcttagggcagagatggacaggttcacctcgtgtctctctaggattctaccagggaggctgggctaggagaggggtcagaaacaaaaagttgagggatggggaaaagtgtgagagcctctctgctgggactccaagccatgcctgccttcctccatcctttccttcctcccagggtatatccctagttacctggacaaagacgagcagtgtgtcgtgtgtggggacaaggcaactggttatcactaccgctgtatcacttgtgagggctgcaaggtatggaagctacctcctgcccctcccctgccacctgagcccccatattactccctatgtcacctaaagcccgcctgttaggtcatcactttttttttttttctttgagacggagtctcactcttgtcccccaggctggagtgcagtggcgcgatcatggctcactgcaacctccgccttcaggttcaagtgattcccctacctcggcctcctgagtagctgggattacaggtatgcacctccacacccagctagtttttttgtatttttagtagagacggggtttcactatgtggccaggctggtctcgaactcctgacctcaggtgaccacccgtctcagcctcctgaagtgctgggattacaggcatacctgcctggttactttctcttctcttctcttattcattcatttactcattcataactcctcctctgccactcacaggaaaattgcctaacttcttcgagccttagtttcagtttcttcatctataaaatgaggataatcattctctctaccttatagcattgttgggagaattaaatatgttgggagatagttcacttgaagtgtttaaaacagtgccattgggtgctgtggctcatgcctaaaatcccagccctttgggagggaggccaaggcgggagcatcccttgatcccaggagtttgagaccagcctagctaacacagtgagacactgtctctacaaaattaaagaaattagctgggtgtggtgccacatgcctgtggtcccagctactcaggaggctgaggtgggagactgcttgaacccagaaggtcagggctgcattgaacggtggtggcgccactgcactccggcctgggtgacagagcaagattctgtctcaaagtaaaataataaaataaaataaaaaatagtgccatgtgcataagaagcatttgataaatgccagccatcacccattcattcagtgtattcttaggtgtgagagtgtagtacgtacctcgccttcaagctgctcacagcctgtcagagagagagacacaacttgaaacaaacatcagtgttattcaaaatgtggttcatggaccacctgtcctactagttaaaatgcagattcccagccttcatcttttttttttttttttttttttgagatggcatctcgctctgttgcccaggttggagtgcaatggtgtgatctcggctcactgcaaccttcgcctcccgggttcaagcgattctcctgcttcagcctcctgagtggctgggactacaggcacctgccaccacgcccagctaacttttatatttttaatagagacagggtttcaccatgttgaccaggatggtcttgatctcttgacctcgtgatccgcccgccttggcctcccaaagtgctggggttacaggtgtgagccactgcgcccagcctgcccaggcttcatcttaaccctgctcactcagagcccttttgtggagcccaggaatcttccttttaacagaatcccggagtgtttcccatgcacctgaaagagcgagagccagtactgggggggtagtgggagctgggagcacagaggagaagaggacagcaggttcttccaggcagaggggatgacaaggtcatagattttgggaggcctaattgttttgttttgttttttttgagatggagtctcgctctgttgcccagcctggagtgcagtggtgcaatcttggctcactgcaacctccacctctcgggttcaagcaattctccctgcttcagcattggtagctgggattacagacacctgccaccaagcctggctaatttttgtatttttagtagagatagggtttcaccatgttagccaggctggtctcgaactcctgacctcaggtgatctgcctgcctctgcatcccaaagtgcttaagaggcctaattagatttcactttgatcatttcagcctggatagcctttccaggatcacctcctaaaaatgcaaggccttccaagaaacagaattatttaaatcccagcactttgggagtccaaggcaggcagatcacctgaggttaccacacccggtggcactgttttaaacacttcaagtgaattgtctcatttaattctcccaacagtgctataaggtagataaaatgattatccccattttatagatgaagaaactgagactcagagaagttaggcaattttcttgtgagtgacagaggagggattatgaatgagcaaatgaacgaatgagtaaggtcaggaatttgagaccatcctggccaacatggtaaaagcctgtctctactaaaaataccaaaattggccaggtgtagtgatgtacgcctgtaatcccacctacttgggaggctgaggcaggagaatctcttgaacttgggagatggaggttacagtgagagtggagattaagtcagtgtactccagcctgggtgacagagcgacagagtgatactctgtctcaaaataaaaaaaaaaagaaacagaatgatttatatgttaaaggccaggtatagtagctcacgcctgtaatccaaacactttaggaggccaaggtgggaggattgcttgagcccaggagtttaagaacagcctgggcaacatagtgagaccctgtccatacaaaaaaatttttaaagtagccaggcatggtggtgcacacacacctgtggtcccagctactcaggcagctgaggtaggacgatcacttgaggctgggaggtcgaagctgctgtgagctgtgattaagccattgcactccagcctgggcgacagaacaagaccctgtcttaaaaacaaaaaacaaacaaaaaaaaaaaacggaaaaaaagtttaaggcttgaagtttctctctctttcttgatgtcaaccaaaccaagaccatgagggatttagagttccctagcagaagcaatacaatccttctggaagcaatacaaacagtgtagcatagagaaaggatcttttactctcacggacatctgagtcccagggaagcaccctgaaaagacagagatgccttggccccacccttggatagttttattttgtagttctggagtgaggcccaggaatctgtatctttggtaggtgcctttggtgacttttttttttttttttttttttcaagacggagtctcactctgtcacccaggctggagtgcagtggcgcgatcttggctcactgcaacctctgcctcccaggttcaagcacttgtcctgcctcagcctcctgagtagctgggattacaggtgcctgccacctcacctggctaattttttgtatttttagtagagacaaggtttcacgatgttggccacgttggtcttgaactcctgacctcgtgatccacccacctcagcctcccaaagagctgggattacaggcgtgagccaccgcactcggctgcctttggtgattttaatgcccctggaatctgagagctcagacgttggtgtcccatacctgaggcccagttctgactctgctgcccaccggccacatgactttgggcaaattgcttcatctcaccaagcttcagtttccttgtctgcaaagtggaggcagtaacagttcctacctcatagggttgtctggagggttcactgtgatgttccatgaaagacaaggcttatcttttgggtttttgtttttgtttgtaatggggtctctgtcacccaggttggagtgcagtggtgcgatcatagctcactgcagccttgacctcctggtctcaagcaatcctaagcaatcctcccacctcagcctccagagtagctgggattataggtgcacgccacaacccctggccaatttgtgtatttttagtagagatggggttttgctatgttggacaggctggtcttgatcttgaactcctggcctcaagtgatctgcctgcctcagcctcccagagtgctgggattacaggtgtgagtcattgcacctggccagcaaggcttatgtttactaagtgactgacacattgtaaacatgaaaaaatactaattcttcatattattgcaatcatcttgagttttgaggtgtttcctttaaaataaaggcgaggctgggtgcggtggctcacgcctgtaatcccagcactttgggaggccgaggtgggcagatcacctgaggtcaggagttcgagaccagcctggccaacatggtgaaaccccatctctataaaaatacaaaaattagccgggcgtaatggtgggcacctgtagtcccagctactcgggaggctgaggcaggagaattgcttgtacctgggaggtggaggttgcagtaagctgagatcacaccactgcactccagcctgggtgacagagtgaaacttcatctcaaaaagaaaaaaaaaattaaattaaaaaaataaaataaaggtgaatcccaatgtagagaattgaaatttttctcttcccctactagagttcatactcagtccctttccttgacttttttggttcccctgttttatgaattccacctgcatggacaacaggcaacatatatgagaatggtttttgggtcagtgttgtttttaaagtcatttagcaaaatggaaaatgaggttttacttggatttccttttttttttttttttttttttttgagacagagttttgctcttgttgcccagactagagtgcaatggcacaatcttggctcaccgcaacctctgcttcctgggttcaagcaattcttctgcctcagcctcccaagtagctgggattacaggcatgtgccaccattcccggctaattttttcttttttttttcttttttgagatgaagtctcactcttgtcacccaggctggagtgcaatgcgagctccacctcctgggttcaagcgattctcctgcctcagcctcccgagtagctgggattacaggggcaggcccagctaatttttatatttttagtagagatggggtttcaccatgttggccaggctggtcttgaactcctgacttcaggcagtctgcccgcctgggcctcccaaagtgctgggattacaggcatgagccaccgcgcccggccaaggggtggaccccgccgtggttccaccgcggctcaaacctaggaccttctgcatgtaaagcagatgtgataactgctacactatagaatcgcatgcttttttttttttttttttttttttttgagatggagtctcattctgtcacccaggctggaatgcagtggcgcgatcttggctcactgcaacctctgtgtcctgggttcaagcaattctctgcctcagcctcctgagtagctgggattacaggcgcccaccaccacgcccgggtaattttttttttttttatacggagtcttgctctgtcacccagcctggagtgcagtggcgcgatcttggctcgtggcaagctccacctcctgggttcacgccattctcctgcctcagcctcccgagtagctgggactacagcgcccaccaccatgcccggctattttttttgtatttttagtagagacagggtttcaccgtgttagccaggatggtctcgatctcctgaccttgtgatccgcctgcctcagcctcccaaagtgctgggattacaggcataagccaccgcgcccggcctacgcccaatttttatacttttagtagagacagggtttcaccatgttggccagggtgatcttgaactcctgacctcatgattcatccgccttggcctcccaaagttctgggattataggcatgagccactgcacccaacctcatgcccggctaattttctatttttagtagagacagggtttcttcatgttggtcaggctggtctcgaactcccgacctcagttgatctgcccacctcggcctcccaaagtgttgggattacatgcgtgcgccaccgcgcccggcgacttggatttccaaagctgctattccttaaggcctcacattatcccaggttcaaagctgcctgctctagacatcattcctgcctctgccacaaacactacccagacacccccaacccctcagcagcctgggggctgagggcatatatttctcaggtccttgagcctagtaatcttgggctcatggtgtcaggaggatgccaggtcccctcactgatcttgccttccttgctctccacccctgacccctagtaaactgcatggttggttcaggaaggggaagccatgtcatgatcacagcctgctccatctcccccaccccagggcttctttcgccgcacaatccagaagaacctccatcccacctattcctgcaaatatgacagctgctgtgtcattgacaagatcacccgcaatcagtgccagctgtgccgcttcaagaagtgcatcgccgtgggcatggccatggactgtaaggggcccaggtggagggaatagagccaggtggcctggggtggggatgagttctgggagggcagcttccttccagggtaccctcagagcccacagggcagagtggcaatccagtctaggtcagaatgttcagtgtcttggtccttgctgtcctccttcctgcgcaaaaggaaacaggatccctgtgtgggccccaatgcctacctgccttacaacactcgagggccttagagagggagtcgtttggtagaaagagctcctgggcacccactctagcacactgttcttgactcccagcgaaggcaccccacttctagatgagacagggcatcttccattggctggggattgggtggcaggatattcgagtaaccaccgtcaccataatccgttagaccagaacatgatattcatctggatcagcccaaactgttgttgacatggtcccggggattaatcatgatccgggttgtgctgcccaactgctaggtgatttgggaagtcatttagcctccatggccctcggtttctccaacctgtactctaggaagagtagtttccgggagcattatggaaaggggatggagggtgccatgcgttagaccttgtgcctctctgttcacagtggttctagatgactcgaagcgggtggccaagcgtaagctgattgagcagaaccgggagcggcggcggaaggaggagatgatccgatcactgcagcagcgaccagagcccactcctgaagagtgggatctgatccacattgccacagaggcccatcgcagcaccaatgcccagggcagccattggaaacagaggcggaaattcctggtaaggagaaagggggcatggggagagcagtagccaggtggcagggagaagagagtgagctcggagtcttgcctcctccaggaagtcttcttagtgtaatccaacccaaaatacatactcttcacacttttgctgtccagattttatacacttgtgtttgtgtccttgctgtctggactgtctactccatccaactgggagctcaatgaggacagggccttgccttcctcatcgaatttccagggagcgggagcgacctttcttctttttcctgcccttagtgactgggaggagagggtaaggatacagttatgtcacagtatttttgagcacctgctgggtgccaggcattatgttaggccctggtcaagctagttgctaagtaaatgatgagtttgggaccaggtgcagtggctcatgcctgtaatcccagcaatttgtgagaccaaggtgggaggatcgcttgagcccaggagtttgagaccagtctgggtaacatacagagatcccacctctatgaataattttttttttttttgatacggagtctcactctcacccaggctagagtgcagtggcacgatctcggctcaccgcaacctccgcctcctgggttcaagcgattctcccgcctccgtctcccgagtagttgggattacaggcactggccaccatgcctggctaatttttgtgtttttagtagagacagggtttcaccatgttgaccaggctggtctcgaactcctgacctcaagtgatccacccgcctcggcctcccaaagtgctgtgattacaagatgtgagccaccatgcccaccctctatgaataatttttttttttttttgagttggagtttcgctcttgttgtccaggctggagtgcagtggcacagtcttggctcaccgcaacctctacctcccggcttcaagcgattctcctgcctcagcttcccaaatagctgggattacaggcgtgcgccaccacgcccggctaattttgtatttttagtagagacggtgtttctccatgttggtcaggcttgtctgaactcgcaacctcaggtgatctgcctgccttggcctcccaaagtgctgggattacaggtgtgagctactgctcccggcctctctacgaataattttaaaattagctgggcatgggggtgtgtgcctgtggtcccagctactcgggaggctgaggcaggaggatcccctaagcctgggaggtcgaggctgcagtaagccatgattacaccgctgcactccagcccaggcaacagagcaagaccctctctcaaaaaatatgatcagtttgggaggagatggacagttggctatacgtggtgaaggaaggcagaaaaccagcacctggttcatggtggagcatgccggggggtggcacagtgcacactgttaagggcacgggctctgattccaagcagatgtgtaacagtcacgagtcagactgcccaagttcaaaccctggtcctaccacttgctggtcatatgactttaaccttattatttagctgccccatgcctcagtttccacatctgtgaaatggtgattattataattattccttttaggattatggtcaggatgaaataagacatgtaaaacatgtagcctgatgcctgatcatatattaagtattcagtcattatagctgctactactgttactaccgttgttattattagctgacttggagctctggttctggtctattctctgctcaagatgaaggaaaagctttgggcctgggactcaggcacgggcggcccctcttccccaagctgccttggagctccccctggtgggcagggagcctcagtgagaggctgaaaggggtctgcggccccagctgacccccgtctttctctctagcccgatgacattggccagtcacccattgtctccatgccggacggagacaaggtggacctggaagccttcagcgagtttaccaagatcatcaccccggccatcacccgtgtggtggactttgccaaaaaactgcccatgttctccgaggtgagtggcagaagtggggagagatgtgatgctgtgctggagggaaacctgctcccccggtcacccagtacaggctcatctgaggttctctggacaaggagcaattcctgtaggtcaacatacacagataacatacacagacacacacacacacatgcatacacatacacccagcacacaggcacacatgcagacacatacacggacacacacacacacctagcatacagatacgtacacagacacacatacacacacacatacacccagcacacagacacacacacacctagtacacaaacacacacacagatacatagaaacacacacagacatatacacccagcacacagacacacacacacacacagacacacacccagcacacaggcacacacacacacacacctagcacacagccacacagatacatagacacacacacacagatacagacacacacacacacacagacatatacacctagcacacagacacacagatacatagacacacacctagcacacagacacacacacacagacacacccagcacacaggcacacacacacacacacacctagcagacacacacatagatacatacagacacacacacaaacacacaggcacacacacacagcatacagacacacgccaaggtctggctgctctaagaaatcagccggctccaagtgctcccctccacagcccctcatccttcaagtctatgcggccacccaactccaggcagcctgaaagttctcattttccagagcactagtgctggagacaggctgccctactagccatgtgacctggggtaagttacctccatcccctgtgcctcagtgttcccatctggagtgggctggggataatgatgggtgctaactcacaggcataatttttttttcttttttgagacagattttcgttctgtcacccaggctggagtgcagtgacgcgatctgggctcactgcaacctccgcctcctgagttcaagcaattctcctgccttagcctcctgagtagctgggactacaggcatgtgccaccacgcccaactaattttgtatttttagtagagatgggtttcaccatgtatgttggccaggctggtctcgaactcctgacctcaagtgatccacccgccttggcctcccatagtgctggcattatagtcgtgagccactgcgccgggcctcacaggcataactgtgaggcttaaatggaatagggcatgcacatggcccaatacaaggtcagccgttcagagtccatgggggccttgcgggcctcacggctcccgtaggacactctaggggagactcaaggacgcggggaggggtatgctgagtgctcctgtggccctgccgctccacagctgccttgcgaagaccagatcatcctcctgaaggggtgctgcatggagatcatgtccctgcgggcggctgtccgctacgaccctgagagcgacaccctgacgctgagtggggagatggctgtcaagcgggagcagctcaagaatggcggcctgggcgtagtctccgacgccatctttgaactgggcaagtcactctctgcctttaacctggatgacacggaagtggctctgctgcaggctgtgctgctaatgtcaacaggtacctgctgattagtcgggagggctcagaagcttccaggggtcccagagattggctggaccctgggcctgttgctcaactccctcctgaatcttcttctgggctacctctctgtcacctgggccatcccctatcccctgttccttgctctgtcacacacttctcactcgttccccaggcccatcccttgcctccccatccctgctctgtgccttttcctgtctttgtctccttccttctcgctgccctgtccctctgtcactcacattcccctttgttccccactccccactttgttctcagccaccttccatcccctcatccctcctctgtctcccagtcccatctcttacccctcagtcccctccctaaccccatctgcaccccgcctctctgaccaccaacctcagtcctccccactccaaggctcctctctctcccccagcccccggcctgtccctctgtcctccttgcattgccccctccccccagtacccccctgcccctctccacttcccagctgcctccctctccctgtgcttctcctgtccacgtctctcagggggagcttctcccctcccctcccccagcctctctgcctctatctcccctctagtcctttcttcccacgtccccacacctcaccctccccatctccaggccttcggccagcccctcgcccctcacgcccctcttccctcacagaccgctcgggcctgctgtgtgtggacaagatcgagaagagtcaggaggcgtacctgctggcgttcgagcactacgtcaaccaccgcaaacacaacattccgcacttctggcccaagctgctgatgaaggtgactgacctccgcatgatcggggcctgccacgccagccgcttcctccacatgaaagtcgagtgccccaccgaactcttccccccactcttcctcgaggtctttgaggatcaggaagtctaaagcctcaggcggccagagggtgtgcggagctggtggggaggagcctggagagaaggggcagagctgggggctgagggagacccccccacaccccttctctccttcctctcgtccttggatagattcagctcccacacacacacccgcactgcccaggtccctcctcagacctccagccctgggacagggcaaacaactgaacttgctatggaaaggacagtgtgggaggctgggggagctgtgtcctgcagttcccaggaccccatcctctcagaaggtaggggaagggcgggaggattgagaagggacaagccaccttgaccgtaggggaaggaggaatgtgggctgggggaagatgccctcaactcaccccctacacacacatgagagagagcccccacccagttccttggcctaggtctcccctccaggctgagggcctctctacttccccagatgcctgggtgcaaagaacggcttggcttggctcctcctctggaggttaaaatttatagtcattctaactgcactttggaaaccaagcaaggggagaagacaaatgaagaaaaactagacagagagaaaaatacaaaaaagagagagcgagcgatagagagagatgatattaagttattaactgaggctgaccagaggggaggaccccccctttaccaccccatgcactttgcgagctgccccttcttcccccacatcagagagaaatgcccccacaccagagccccaagggtagggctgccgatcagagctgtgagttaacacaacagggtcctggccaccccccttgccataccccgccctctgtgcccctttggcaccccccaaccctagtatgtcctctgctttctgccactcgtgcccgctgagttccatctacctctcatgctggatgccagctggcccctcaccagcctgccctgctgcccacacagctcccctttaagtgcccagccctaggggcctctccccatccacctcctccttccacaccttggcacccacccaggaaaaaactgtggctccaactcctaccctccttatatcctgcagtattagctagaaaccggatgctgctgcattggttgggtcgggggtaggagggctgtgcgtgagcgtctcccagaaccctccacccctttagcactctgtttccctgtttcccatctgtcttctgggctctctctaacctctgccctcctccccagctcctactcactgcactaactctgggcgggcaggtaccagaatgggggtgtttagataagtgacacttagttggggccccaggggaggggtggtcggtgctcctttttctttaaagctcttttggccagctgcccctctgccccgggaccccttcccctcttcttttctctaattcagggactttggcttgagcccctctcgccctcctggtgagggtgctctgttggtctgcacttgggtgagctgtcctcctccccctccctgtggctgccgcccactcctcaggggagagagggagagaggaggtggtcctcccatgggagcaggaggtggggtgggacagagcagaccagagggtgctgggctcagggctgcatgtcggcagggatggatgggtggacacagatgcccccggaagccatggggattggggcagggggtggggggaggggtgccagggcttcctgcgctttgcactattggggcaaaaatgtcttaagcagtggggaacctgccaccccaccctgaccctcagcctgccacagccccctacacacacacacacacacacacacacacacacacacacacggacatgcacacacggacatgggaaggcaatgctatgctgcccgtcagggcactgtccttccccaatcgttcaggtgttccaacaggggtggagggcctggaggagcacccgctgtcacctgtgcatgtgcctgtcccaccctgctggggcctcgggctgcccgcgctgtctttgtctctatcctctctctctctcctggagtactgaatcctgtattactccagtcccatgggtaggccctcttgtaccttcctaccacgcctgggggcccagtggaattcctgacctgtctgctgtcttccccatccctccatccccaccccaacccctccatccccattctcagccatggacacggcagagaaaaggccttgaagagccttagcctcttataggcacttgggactcccccaccctccccaatcatatgagctgtgatcccatcctccccggacccctcccttccccctcggtgatgtggggtgtatgtgtgcgttcctctgcgtgaatgtgtgagtgagtacacatggtaggggaggagccagggcgactcaggagtgccacgcacctgctctagagcggcagctgtcccagtccctgctgtggaagtgggggacagggccctctcctgggggccattggtgctaatgagggggatggccttgatgtgggtgctcagcatgcctcccccagtattggcccggggcactagggcaggcagggtggagcagcaggtgcagtatcggtgggaggacgggttgctgggaataggacgagggggccaggccaggacaaggggttgccagagccatgaccactaccccgcccccaccacccgcctctccatctcagtattgcccctcccatcactcataacacacatacctcatccagcctcctccctgctcagacttggggagggtgggggaggagcccctaccccttctcctggtggcgggtctgcagggctgggagagggcagggcgttgtgagagagagaccgtccataaggaggacagtaactcctgccctgggaactcctgggcgggggggagggggacactgcccagaggcgctactgaatgtatgagaagctggtgctgggctggggggaggggggttgtggccagaaacagggaaggaggtaggtctcttccccagggaggggtgggaccggcaggggtgacttgaggggctcctactcctgccccacgttgacaatcagtatgtctgttatgtgcgatttttcaccccgttgtgttttgggtcaggattttaaagaaagatatttttatggtaattgttgctcgtctattttactatatatttatgtaataaatatatgatgaaaataacccccttgggcaccccccttagacttgtgtgctgtttccctatatcctcccatctgctggcagagtacccaccccacaaactgaccagatggagaggtggccccccccagccttggcagtatttccaccccaccccccaaacgagcacacaccacagaagccagctcagctgtgaactattggatttgagacaggaacagaacaaatcagagggccaggggagggttgtgggggagacagagtggtttaaataggggaggaggggaagttcggtgatgggggagggaggcaggtatttacaagaaggctcagggggccagaggctcatcttggaatattttataacaatataaataagattctggtttgcttttccttttcgtctcgtaaaggagagagaagtgcagagttcgattctgtacaagggggcagcggcagaaggccggccgggcgggtcactgggcgtccacccggaaggacagcagcttctcggaatgcatgttgttcagggtccgcaggtccggcagcttgagcagcagcttggtgaagcgggaagtctccaagggccggttcttcagcaccagagcccgaagagcccgcagcagcgtctcctggagctgctccaccgaagcggaattctccatgcccgagcggtctgtggggaagacgacagcagtgaggcggactccccgagctcctctgaggaggaaccggaggtctgcgaggacctggcaggcaatgcagcctctccctgaagccccccagaaggccgatggggaaggagaaggagtgccataccttctcccaggcctctgccccaagagcaggaggtgcctgaaagctgggagcgtgggctcagcagggctggtcacctcccatcccgtaagaccaccttcccttcctcagcaggccaaacatggccagactcccttgctttttgctgtgtagttccctctgcctgggatgcccttccccctttctctgcctggcaacatcttacttgtcctttgaggccccaactcaagtgtcacctccttccccagctcccccaggcagaaatagttgtctgtgcttccttggttcatgcttctactgtgacacttatctcactgttttataattagtcgggcatgagtctgtttcccaagctagactgtgtctgaatcatgtctgtatccccagtgcccggtgcagggcctggcatagagtaggtactccataaaaggtgtgttgaattgaactgcgtctgcctcctcccccgggtcaggcgagagcctgacctacctgcagagacaagcaccaccgcggtgaagaggcccagctcctcctcggtaagcgccagggagttgagcttctcgctgaagtcgaacatggcactgagcaggtctcccatgcccatggcaccaagctcctgcaggctgtaggtggtgcggcttaggaacatcactgtctggtccttcacgttgaacaacgaagcaaagcgcaccatcagcacctaggagggaaggggaacagtcatcctgggtgtggtgggaggagcactgaccaaatcgcccctgtagtttgccagagggtttagcggtgctgccttcgatttctcagtagagtgggggttgtttctgaatggccaatgagggagcccaggtggaaggatggctttgggatccaataagcctgaatctgagtgtcagctttgtcactacctgtgaccttgggcaaggcattcaccaaagttaatctgctcttgtctagaatgggggcagcagtgcacccaaggcattatttcagtgtaatgggttgtgattaaattccagctgagatgacagaagtcccagccatcaagaggaagcagcaggagccgctcagcccctttcaccaatcaggctataaggacaaagatactgggttccaaaacctttcagaggtcctgcccaccccagacagcagggctttctgttggatccttcccaaggtcaaaagcaggaagcgtctgggtgcaatggctcacgcctgtaatcccaatactttgggagtccaaggcgggcagatcacctggggtcaggagtttgagaccagcctggccaacatggcgaaaccctgtctctaataaaaatataaaaattagccaagcgtggtggcgggaacctgtaatcccagctacttggaaggctgaggtaggagaattgcttgaacccaggaggtggaggttgcagtgagtggagatcgcaccattgcactccagcctgggcgacaagcgaaactctgtctcaaaaaaaacaaaaaccagaagcataaacggtcactcacctcaaaggtgccagccttaagcagggtgacttggtcatgctgagaaaggtcacggaagcccgggatgtgtttggcaaactctaccacctcccgcacagcgggcgtgaagctcatggagaaatcctcccagatctcctgcaccgttcgcccactgcgtccatgcgggtacatgttcataggacatgcctgggggaggaaaagattgaaggaggggagtgtcagccaggctgggtcagatggacgccccgagcagagctggaccccagattctgcctgggctaggggctgtggccctgaaggatgggtctttcagataaagtagcaattaggtgccaggtggagattagggattcccaggcagagtccagactgcaaggcaagacattttctcctgggaagatgctatccccacactcagcctccaggaacccccagctgccctacactaagtccattctgccaggcccccccaatcttcttaacgcactcgcccgcccccatgcccttaccagcagaacattctttgagttgccctgccggggactgttggcaggtgccttgccttctggggctgcatacacgtgggtggggcatagacggtgcccgttgctgttggactggtggcagctgtggtgtgcagggccaggaggccaggtgggagggtaggaggagggagcctggcgcagaccatttagggcctcgttatgacgctgggcagccaaggtgttgttgtcattgggggcaggtgggcagccctgattttcccagcgatgtggggtggtggctggagggctacctgatgcatggttggcattgaagttgccaggtgagctgcccagcttgtcatgggcgtaggtgaagatctctcgatgggcccgggccacctgggatatcacatcctccactgtgggctcagggcttggggatctgggaggcgtcagctgttgtggaaactgggagaagcccaccaggggtgaggggaccggagcagggggtggcgaggggcccatggggcctggggtggggtgctgggtgggtgaagtctccagcgggcactggctgctcaactggttgttggccaggttcatggcactctgcatctcagcaagcatccgctgcttctctcgtttggggatgcgcccaaaacgcacagctgcaacaggatgagaacagcatcaggaagttctcaaccatgctcacgtgcttctcttccttccttcctcctgaaagggcaaggccctgaaggcttggggtttcacatcaaaactaaaaccagcaagtccccacccatcaagggggtttccctaggagggattgctggtaggaggtgacccgagggaccaatgggatagaagtatatgttgacccaagcaaatgaaggatggacatcccctggcacatgtgattcacagtatgatgtgtctccatttgtgacttttttaaagggaaggattaattcagaaactttgggcggaagaaggggggaggatgtggggatgctgcctcaccgtctcgagacatgcccacagagagacacttcttgaagcgacattgctggcagcggttgcgattgatgcggacgatggagcaattctcattcttcagacaccttttgtactggatgttctgctggatgctccgacggaaaaagccctggagggcaggggtggttagtgaccacctccatcatggctgggcctctgtgtccagggggagggggccacctgcccctgcccttacccccagtccgcctcaccttgcagccctcgcaggcgtgcacaccgtagtggaagcccgaggcaacgtccccacacactttacacagtaacaccatgccattcagctctgtggaagagacgggcagcaggtgagcaggagaggccaggctgagtggccacaggtgtggaggctttctgggccggagatccagggagggaaaagctaaggaggaactccagtgttgaggggcactggagtgacaaaactgggctgaagaggggctggtgccactctaggagaaatccctgaagccagaataggtcctggcaagactggtgtcacgtaaaaacccattcccaatctggccctggcctgcttcccttcccccgaatcagctggaaaggtactcactggtgatgttgctggtgctcttgctgggggacactcggctgctgtcctccatggccacttgtagactcccaggggggctcccattatagaaggaggaggaggatgacgacgaggaagatgaggaagaaggggagccgtcatcactcaggctgggtggaatgctcccaaaggagcgagccgggtcttgggtgagggagccagtgggggatggtgggaagtaggtgggacagccttgggtcagggactggaagctgccattggagttgtcactatagagggattcagggctggtgcggcttggggaggagccactggagccaatgtaggtgatgacgccacctggagagagaacaaaaggaaagggggtgtcagccgccatgtctccggacctagggtgccactgtgctcatccccacctgtctgcccaaaacattgctggccactcagttcaccatgtggagcccctaatcttggagttaataagcaattccccaacacacagtagacatggcatggccaagcaacacctacgaccctttgcaggccaccttcagcttctgctttcagtatgaggcatgacccctgtggcatctcgcatatgtgccccccttccttagttgccttccttgggaatatcgactgcagctaatgacttagttgtcagttgaagatctggggatgggatgggcagctgagcaccattcaaagtgcccagtcctccaaaaacaaaaacccagctgctgattttaacactaagaccattccaggaatgagaccatggaccatggagagataggtagccaacagtaaagagaatggagggtttacaaaagtaagacagtcacattccccccagttggggacatatattctctgaaggaaatgaagggaaggaatctgcccagcctggttcccctggcctcttaagagagtgagccacagtggagtctatccctgtgtccaaaaaggacttcgaggtgcgagttgcaggaggtggaagtacaaactgtccagcctggggctctaaaattcccccttcagatctcagcctggtaacaatgaccttggctctctggccattcagggactttgaccctctggttacattgccaatgaggtggctgtgctcccgtggtattagcaggagaaaaaggtgacctgcctgccacacctccggcaagcacctagattggtctgccatgggcggggtgggagaagggaggatcccaggacacatgtgacctaacacatgccatgccactgtgtctgcagaggcacatgtcttgctcacccactgacacacactgaactgggcagggcggccctaaaatagctcaaggttggtcagggtgaacccagctccttggaaaatagttgcacaacagatcagctcccccggtttcagggctgaggtgggggatggaatcattagttggcagtaaatgaagttgacctagttcacccatcccccaaaaaggagtgagaccttcatgcagaggcttccaacgtggaagtgaggagcatactcaagagtctaggtctaggtctagacccatcactaccaacttattttgtgacctagaggacatcaactcccctctttgggtctcagttttcctttctgtgagaaaaaaaggacagtatcatttcagctatgattgtggggtgcagttgctttggggagcccttagtaggcaaactgcagcttgtctggtggagatgggggtaagacaatgctcgcagaactaaggagagagaagcttggggaacaggaatttgtaatgtggggaagctgagtctaaatgcagtacggtgaagtaggtgcaaataagagtgaagtggaaaggagtgagaagggtggttaggggtgaggtctctttagggagtgtaaaacagaaggccatgaaaggtcaggaatggctccatgttactttgttttggtgatgggggagggggccgggcaggcggaccggaaaaggaggcaggcgggggcggtgagtcagcccagcttcacccagatctcggcggggcggggcagggcgggagctgggccctcagccggcctcacgtccctgctccacgtgtgcctctcgcacgtggctccccaacgaggaaccccggaactcgaggccccgccctcctcgcttcccgtcaatcgagagcagtcgccccgcctcctacccgcccttccccggccaccaggtcgtgggctggaccccgaacgatagcagggccaggacaacctaggggaggagagaagggaacacgcgttgccggggcgaccgggggggcggagctcattatgtaacgaggccgggaggcaacgaccaatggggtggcagccacggcttctgctgaatgaaaacaaacgcagcacgtgggcccggctctagagccatgtgagccctcccggcggccggagccctgtaggtgccctccctcgggccgggcaccacgctctggactcctcaagtgtcgctccctcctgtcactgaggattccccagtgagatccgaacgattctcccagcccctccttccctgaaccccatcgcgccactcttctcagattccctcgcgcctgcaggaactagaggagggggaagacaagaggggagggggtccgttttctgaggccaggcatactacagctgcaggtagtggacagatggggccgtttcggggcactgttccaaagctcccagtccccctaaattcttcgcttcaccacccgtacctcctctccatttcctcctgcccagggattcgaggctcaagggagctttgggactctgaggggtggtgatggggcgtttctgagagcatttccagcccgaacaagccgctctggaaatcccacactaaagcaccgcagcacgttagcaaatctccgggccgagggacaccccagtcccttacaaagttcctctttttataaggcgtagatggaggtggggagacagtgacagggaaaagatgatagtaaagaaatctcagtacctgtgttgttgttggagtccagggtcgtcatgtcttcaccagctgagagcggtcattcaaactggaccttgactcaaactagaggttgcgatcgccgctgttgccccctgggcactggctaagggcggggagtggaccccgcgactcacgatcaggatccgaagcaccctgcagcaaggtcttggggtggccggactgcagccctgcagaagggttggacgttgaggcaacggagttctgctttgcatgggaagagcagagagagtgtgtagggggaatcagcctgcagtagttctggctagaaggtagcaaggagggtcgggtctctgcagtgtacggggtgcctctgcctgccggctccgcagcgctgcggggtggcgaatctggagctcccggtgcaaaagtcccagaggaagagaggttgcaaccaggaagtaagtaggtgatggggagaaacggggcaccgagtcgcaaagaggcgagacgtgtgccctgctacgttccctcggcagtaatatttcactctgccaatctcagccgccttttgcccgagcctttccctgggacagagggctctgcgcaggcgccagcagcccagggttcccgggccgcacgcggcactggagcaggtaccatgtgatcccagggagcgcctcgtgccccagtgacacacttttccaacagccggcacgttgagctcttgcgcgcctgcgcaacgacaagactgtcgggatttgtagtccaccgacaaagtgggcggactgcgtgcctttcccctttctgcctggcaaagcgcttgccgggacctgggaggagctgagagtggggtggggtggggtgcgctgaagagtcagggtggcgtgtttagaaagcctgtatggcaggggcatgtgaatttctggggagggactggcaagcttgtttgctgtctgggagatcaaagctaagaggccctttctgcaaaccttgcaaacgtgagggcttcacgtgattgcaggactgacctcgtcctgaggttactggtgaccgggagagagagaagccggggagggagatttccctggagtcaggagcttaggctgccctctgcttcagggcaaagtccagagaaggaaaggaaatgtgaccccctttcccttctactcgccttagggagaacacctccaggggaaggagttcccacagaggtagggatgtctgtagggactccctgtttgcttgtatgacaccattccacccactccagttgactttggggtgagtcatttccctttgtctgggaaataaaaaggacaacagaggggaactaatagtgaaagtgctttgaggtcctaaagtaatggggaagaggtgaggcagggggtgggggcagagtgacacccctgcccctcggtgctggaggataaaatatgaattccacagaagattactactcagaggggaacatgtagatcatcttaagcctccctctttttactagtggggaacaggaagcttaggagaagtgaccgacccaaggtcagacgtccattgctagtttcatctgcccaccccgaatgggaaggtgggtagatgtacaagtgaaatactgaacaggggttagaaacagccagcattgccgggtgctttggctcatgcctgtaatcccagcactttgtgaggctgaggtgggttgatcacctgaggtcaggagtttgagaccagcctgaccaacacggtgaaaccacgtctctactaaaaatacaaaaattagccggatgtggtggtgggtgcctgtaatcccagctagtcaggaggctgaggcaggagaatcgctagaacccgggaggtggaggttgcagtgagccgagatcgccattgcactccggcctgggggatagagtgagactctgtctccaaaacaaacaaacaaaaaacagccagtatttcgcttcagagcagcaactgtcccatgagtaataacagatctcaagtagaggagatctatcatgttagagggcttgggtcatggaggggatggaagcttcttaggcagcgaagggagagggagcctgagccacctgctgctcccgctaattcctccccagtcccagtgcttctagagagggttttcttcacataggaagcccttctccacaggcagctcctgggatggtattgatggatgcctgggaaacatgaaagccaccgaaaaggtagagaaaaagaatatgggagtccgggggtggtggctgacacctgtaatcccagcattttgggaggctgaagtgggcagatcacctgaggtcaggagttcgagaccagcctggccaacatggtgaaaccccatctctactaaaaatacaaaaattagctgggcgtggtggcgcacgcctgtagtcccagccactcgggaggctgaggcaggagaattgcttgaacccaggagatggagattgcagtgagccgagatcatgccactgcacaacagcctgggcaacagggtgagagtccatctcaaagaaaaaaaaaaaaggccaagtgtggtggtggctcacacctgtaatcccagcacttggggaggccgaggcaggtggatcacccgaggtcaggagtttgagaccagcctggccaacatggagaaacctcgtctctactaaaaatacaaaaattagctgggcgtggtggcgcacgcctgtagtcccagctactctactcgggaggctgaggcaggagaattgcttgaacccgggaggcagaggttgcagtgacctgagatcgcgccagtgcactccagcatgggcaacaagaccgaaactccatctcaaaaaaagaaaaaaaaaaaaagaataataatatgagcacaggagtaaactgggtagtgaggacagtgaggttgactgcaggagcttgaccactcaccctctgactccttgtagaagatgagcttcctggaatgggctaggctttagctttgttctcctgctcccaagaaaagtgggagagagagggcagtgggctcttctctggccctttggcccagagttgggaagctgcagcagagtgtgggagcaactgggaggggctaaaacaaacaaggaaagaggcttttcaggaaaacttggttctcagcctccaccccctctccctccaccctctgggctctggagggaaagctaggaggtgaattgccctgtcctgcccttgcctgctctctgtgaccttgactccaagtcagagccagggccagagcccaggtgtctgtcagggctggactcaaaatcaggacccctggcgtgcatctagctccccacagcacagcaccaccactagcaccctccctttacttggccggggtcctccccaaggcccacagctctgtttgctgctgtggaggtcctacccaccccctgtatacttgctggatgtttgttcttctaggagtgggagctggggtgggtcaagactcctcgcctgctgcaatcagtgagaaggaggagggagcagaggtagagagagctgaaattcagtcagcctgactctcctcttggcaaaacctgggtggttctgcagtctgtgtgtggtgtgaaggcagaggctgggagggagggggcaaaggagaggggttacccccttgctccttccttccttcctttccatttcttatagggcccttccttttctccctcacaagtaattcgggtgtctttcttctacagctggtgagaggagtacagaatgaaaaggcagggttctctcttggccccagaagcttctagtcagtctgtgtaccctgctcctttctctgtcagcagctgctgggagaagggcagaaactctgagacccaaagccaccaaagggaggggggaaaggctgggttgtctggctctgggtgattcggagtagaatcttggtttctctttgacctcaaccttggctgtaagaccttaagacaacaggtgtatctcaacacaaccttcctcacctatccctccagctggacattgctgttcacttctttttttttttgagacagagtcccactctatcgcccaggctggagtgcagtggctcactgcaacctccaccttccgggtttaagccattctcctgtctcagcgtcccaagttgctgggactgcaggagcacgccacaatgcctggctaattttttttatatttttagtagagatggggtttcaccatattagtcaggctggtcttgaactcctgacctaaggtgatccacccacctcagcctcccaaagtgctgggatagcaggcgtgagccaccatgcccggcctgctgttcacttctacacacacacacacacaccccatttctcccatagcccagttcaactcaagaaagcacttaactcttcataaatagtactcagattggatccaggtagaaaagatgcatattcacaacctggtacagcaaggcactgccctggttctgcatacacttccacttggattcccaagtctgggattctggggacgaaccttcccattaggggcagtgttggatcctgcctgtgtgtttccaaatatgtctttaattttccttgatttatttggactgcagaggacagcagacacagaggagaagaaggaaaggtattgagaacactaagctctggtcagttatgtatgtgtgcacgtgtgtgtgtgtgtgtgtgtgattctatgactatgagtgagactgcatgtttgtgtgtgagtgtgaatgctgtgtgtgtgggtgtgcatgtttgatctgagatctgttctccctgtcagtaggttgttctgggtaacagggcaacaccctgtgcaaattctgggtggcctaaatcttgggccaactgcttgactgactgactgactgactgactgactgactgagggtgggtccttgctggaaacaggtcaggcttctgtagatgccttcccatccccctcctttctcaccaagaaaccattgcccagagtagaaacctgtctgcccaggtgatgcaaacctggtatagaaatgctggggatgcccctgaatcagggaaccagccatgtgcctgggagagactcactccctgccctcctaaatccttttctttgtctctaaaaggccagctatctttcccaaccccacccaaagcctggatgttttggggagaactttaagaacatgccacaggaaggacagagtctgagctaacttgtttctcagtgtggtggggggagggggatggagaaagcaagggcgaggcatgagccagggctgggttccatggatgtgttttgcctcagattctatctttacctcactactgctttttccaaggaaaggaaaccataaatatgtattaagtaccaaccgtatgccaggcactgtgcaaagtgttttgtacacattatctcatttaatattcacaacaaccctatgctgtaggtctcattcttattttagagatggggaaactgagacttagagaactttattaacttgcccagggtgccagagggtctaggtgattagtcttgaagctgtaatttgcatagcacttaagactgagaagatgtccatcaaagaatgatagcgcggatggagattattggaggggctaaatctcccctctagctatctcttgaactaccactgtcagcgtcacaatgaaaatggcaatgctggggattcaaccccaggcgtgaagatgaaactctttctgctagcaagactgcccctcctagagagattactgccaccctaggggaacgtctgagcagcaaactcatcctggtgtttcccaagcaatggtgatgcttggaagtgggatatatcaccaagaacagaagcctgaagcaccccttgtccctgtcccagggagtacctcagctttccaaaatctctcttttaaccccaggcacatttcctcttcccctaaactcttcccactccccgtcctacatttccctcatctggttctaaaagtagaaggggcaggaacagggtgcacaaaccacagactgctatagaggtgactaacagaaacaggcgtctgaactctcttctctacccaaaccctctgaatttggggtctgctgctggtggtgaggagagtggggcaagtaggtcagggccctctgaagtcccatggtgcttcattccaggagctgtattaagaagattggttgagggagcgtgtggaaggccaccaaggaccaacaaaagttgtgtccaaagccttaaggaaacagcatcccacttccccatttacctgcttgagcaacgtgcacctctaaaaccagcccttccgaaagccactgtcctgggccaatgcttcttcagcagatgctttgaagaacctgaagaagggtcccctctctcagaacctaggatctcacccacatcacaggatcctggaggaggcatggattgtccttggcagtggagactaagccccagatgaccctttttctggcatccagtacatgctctgctaaggcctcctgtccaatctttgccatgctgctggagccacagtggtatcatcttccaggcccctgcacctgcccattggctgcccttgagcctctgtagaactcagatgcagggagaatgtgggggaggtggaggaaagggagagggggtgctctgcatctgcttccatctctaccctttatcccaagctccatctcaaaccctctccttatccagtgtctctccatcctttgggcctctgcagatcaccattagctgcctggggaggccagaggctcatgacagtcctcgtgagcagaatggacctcggaggagcggtggcctgggcaggcattaggggccttgtgtagcttctgggaggcttacataaacactggctgggatggggaggaaaggggggttgcaatggctgcccagggaaaaaagcaacccccgcccggccggctcagcctgagtggaaagaaggaacaaggcttactttccctcctctcactcctctcccctggtctgcagctgttagtcgggctggaaagactgcggtatcttgggggagggggggcaggagaaggagagagagaggatgcgacttcacaaatttgggatccctcctcctcttctaaattggggggagggcgagtggggaagaagcagtttgccaaagagattttcaatgccgcaggaaggagctttggctcattagaatgcgcagtttgcaccctggaaaaaaaaaatctgtgctggttgcaaaaatgcagacgtgtgtaggggcccagcggagattaaaaaaaaaaaaaaaaagcgctagctctgcaatgcaggatctgcgaagttttggtgcgatgaggaaatgtgggtcgtgctcatttcatttgcttgttcctgctaacctactgtccccctgactctagcatagtctcatagcccagcaagaggcaccgcagcttagaaatggggtcacgagtagggggcagaagcagagagccagaagtgggggtctgtggttagagtgcccagagaaggaccaatggaggttagagggccaggcagatggaagggggcacttcaatgagggatggaggctgaatttgccttttgcacacgcatttgttctgcagctacacaggggttattgggaaagcccttctaggtttcctccagccctcggctcttccccatctccaagtagcagagggactttccccttccggtccactaacctcacagaccactgttgcagaacctttgcttcatgtccccaaacacacaaatccctgaactgtccttgttctaaccctggagggggcacttgctgcgtgtgtgtgtcatcctccttcctagaaagaggggacagggtagcctgatttggggagcccaggctacagggaagccaagtcttggctctgggcagacatcaacacatcaccatgagggctggggtgggctgttctgtgttcttggcttgggaaggtcctttgttcttttgaggcttagggttctgggttgtgaaaacaccaaggggctgcctgggaggaaaatatgcttggggagaccatgtttcttttctgggtgtttgctcccctggtggctcaggagagacaaaaggagacagaagcaggataaagcgcaaggagacaagaagggagccccgcgcgctttccctccttcctcatcttgcctcctgtttctctggcccacggaggaaggggcccagtgtgtttgtgccggctcgaggctcacgcgggctgccggggtcacatggcccgggcatgtgcagcctgctccatttctaccacaacaactcgctcataaacagcccggctgctgcggcggtggcggtggagacatgtgcaagcgagggggtggggcacgtggccctgcccgagccaagggaaggcgctcgctcagcactgcctccacccctccccagcactggcgctgcctcgtcacaggaaattcctagtgctcctgttgctgctgcaaaacatgttttggggaagtgactttcaataaggatggaatcaatggactatttaaaaagagacagaatggataatcagttagagaccgacttacgcctgcccttaccctctcttaagatctctgtactggttagggtggtaccagttccttcctcctatataaaattggaaccatgtaatcccagcactttgggaggccaacgtgggcggatcatttgaggtcaggagttcgagaccagcctggccaacatggtgaaaccccatctctacaaaaaataaaaaaaaattagccaggcatggtagtgggcgcctgtaatcccagctacctgggaggctgaggcatgagaatcgcttgaacccgggaggcggaggttgtagtgagccgagatcatgcaactgcactccagcctgggcaacagagcgaggccctgtctcaaaaaaaaaaaaaaaatggaaccaatcaagtcctcatggtaaacagtggggggaggggctggggttctctaagacagtggttctcaagataagcatagggatctggggtcacctgggaacatgttagaaatgcaaattcccaggccccatcccaggtggattgaatcagaagctctgggagcaaaacccagcaatctgagttttaacaaggcccttgggattctgggaagcctgagacccactgctttaggtcttcggtccctaacaatcagtcctctaggagaatctagcccaagatctggggacatgtcagctgggcgtggtggctcatccctgtaatcccagcactttgggaggctgaggcaggcggatcacttgaggccacgcattggacaccagcctggtcaacatggtgaaaccccgtctctacaaaaaaatacaaaaattagccgggtgtggtgtgtgcctgtaatcccagctgctcaggaggctgaggcaggagaattccttgaactgggaggtggaggttaccatgagccaagatcacacactgcactccagcctgggcgacagagtgagaccctgtctcaaaaaaaaaaaaaaaaaaaaagatctgggggcatgtctaccttccccctttgtgctgcttcatctcaaagtccagccacagggcgtaatcagatttagtttgactcagagtaaaaagcatttattgagtgcctcctgtgtgcagattctggaaatgcgggcaaatggcacaacagtagtaggctaatgagtagctgagatctcaaagaggagtggaaggtactgggtgaggggagagtgaaagaaagaaaaggttagaattttatttgtttatcctttctccatcttacctacttttcttcctgtcccgaggctcctattagaacaaatgattgtggcttaaattgttttgaggctggaggtagaaattaagcccttatctatttttgctggccatggggaccccaagttagttaacagccataggctcttgacttcccatgagtaactaaaagaagatgaggaccatgcacacaggcacacacaaacactccctgcgatctcagatgctagggtagggagaccaagagaaggaatgaagtcccagaaggttggaagttccctgggtaaaatgagtttagcagataacaagcaggaaaagtctttcaataggggagggcggggtcatccctggcctactccaccttcctgagacccagaaactgtggccagaggaaacaaagggtccctaaggcaaatcacaaaagctcctgagaatgaaacctgagcctggaaagagagtagagaatgagggatggacaccagatccaaagggttcccttacacaggcaaatgggggttagggggttgggagggatgtgagccatgcccagcccctctccttgggccttctctccatcacaggcagttctcaggagcagaactcctgttactgtctcagtctgagcagctgactcctggcctctccctgcttcattttttgaggaataagcttttctctgattctcacagagccctttcttttgcttctctgcaaggctttctctctgtgcctgaaaggctctgggctcaaggagcagacagccctgcaggctcaactgcagtgacctacattggctctcccctaggccctgggtgcgggggctgagatttcaagataggaacctgggaatctggcacaggtctacagatgatgacatcaggcagacaggctgcaaaagtggcattgagggactggaccctgaggcaggggatgccataggactatgttctcactttgtcatttgagggctttttatggacaagagatcagaagagatcaaatgcaaaaacacctgagcagtgaccccttggagaggagccagtggtccctgacaggcccagtctctattaatgagatttgggagtggtttctgcctgctccctgttcttgctgaacctacactggtctgctgcaggggactggaaagatgatgtggaagaatgagttcggatttcagctgatttatttcagggaaacgaaggctgggtaaaagtcagatatgcagaaatccacgtactcccaggcttaactataatatagagaccctgtatttctttagactcaatggttctgagaaggatccagaaggagccctcaagattaattaccatttacaaagtccttacctcaggaccctggcaactgaatccctccttccagctaccagccttctggaacagagaaggcagcttctgaaataggtgctttccctctctcccactataagccacagtgtttaggatgaccactgcttccagattgtgtgatttgccctggcaaggaaatcctattgtggggggaggaaatgaggcagtcgtgacacaaagtgatggatgagccttttgcttagcagagagagagagaaagccggcaggctgtgcagaactgagtggctcttgggtccaaagggcttccccttggccaagtcccaccccaaagcccaggaagtccacagcttggcgcccagtcaaggcaaaaacattcctcaggactctgacaggctgggggatggttcccaccacgaggatgggggaggggaaggaaacacgcgggggaggaaatgaccacaaagaagggggtgagggtaagaggtggggagtgagttctcagtgccctgagtcccttttagagagaaaggttgaggctggactcattggcttgtgaaggacttgcagcttcagagcacatgacttctgggtcacccttctgctcagggtcatccctgatgacccaaggtgtcctctggaggcttgttaactcaatctccctccttacgcaggggctgtggttgagcttgggagcccctgagtggctaaaagctggaattgcagttgtgctgggggaggagcccatcgggtctccctctgcctctccacctccgcccctccctttccctctccctaagcccaggactctggaaatagcacctggtaatgggagcgctgacagatgctgagttataggagagcaaatgtcctggctagagtcctcaacattctagtttgatcgcttttgggctgtttcccttgaaaacacgtgccccagcaaggattgaaaaactacctattggtactatgctcactacctgggtgacaggttcagtcataccccaaacttcaccattacacaatatacccttgtaacaaacctgcatatgtaccccctgaatctaaaataaaagttgaaatacacacacggaaaaataggtgccccaggactacttccattgtcttccataaattactgtttaacatgcccctgggtagtgtgcttcctggctactgagatccccctcctagggctccccggcttgtagcttctggaccattcactgtccatgacccctatgaccttggagggagaaatggccccacaataattctgattttaaatttacccctccctacctgcactacttagtcctagttttcctcctctgagccttgcccacaactccttccccaagtcagcctccaaccttgaatgttccctcacccccagttccctacccaatcccccaatcccacatctcctgtaggggataggagtgaggtgaaaaatggacaaagcttagaaatttttccaaggaaactagttccctctgcatggcttcctttgacctattttctaactttccctggttagcccccttgttccatgtaccaaggcttcccactggactaatttttgctgccccgccctactcctccttcctccaacatgatctcctggggctcttcccatccagggaaaatgttccccagtgctgagagagggagagattccattttggaaactatgtcagcttgaggagtccgagctcttaaagagacaactagagtgttgctggggaagcgggtagtggtagtgagcaaaaagcagctcacccacccagaggaggccctgttcccatcacccagcccataattagggcattcttggctcttgtctggaatgggaggatctgagtgctctgccaacatcatgaagaactcaacgggaaatggagttggagtagaggtaaccaactttgcagctggaaattaaaattttattcaactccacccccaagtaattttatttgatgacatccttctcttgcatttgtctcatcgtttgattgtgtaatccttagccagggagctatgtagatatgaaatcattttaaacagaggcagctgcattcccctattgtacctgagccctcatcagctttcctcctctcaagctgctgccccacattcaccctgaagggggcacttttgttcagtcgttagctggtgccagctgaaagcgagctccaggaaggaaacataacaattggtcacatgttggggtgagggttctcgcaggggctgctgggacagggaagggaggtccacgtggagtgggcggaacgcgctgaaagttttggcggggctagcagagggagaaaaatacccaaatttgagttgtgatttttaatagggggaaaaaaaaaaggcaaggagggtgtgtcctaccctctgagaggcccccgcagaggggagcaggagagcagcacactagcatcctgctcgcggaagcctggaacgcaggacatggtttctgccagaaagagctgagccaggccaggctgcggagctggaagcctctgtggctccacgctggcttcccatcccccatcctcccggagaaggcaaaggtggcctctccaactgtggtgtcctttcagtgtcacaggactggggtaataccagtcacacaactccagtctctatttacctttccgagagcttcaggaaaccacccagatgaatcctctttccctggggagtggccaaaacaagtctcctcttttttctacctacttctgccccactgttagctggaaaacgtagctttatacagtcataaagctgcaagggaccttaaagatgatttatttccattttattttttggtctgggaaaaccaagcccagtcaagtgaaaagtcttgctgcatcctctttccacgacataggcattcccttcaaagaatgtaggtcatagaaatggaattctgccattctataagccttagaggggtggtgaaagtattggcttttaactctttccatactcttagccagaaggcaaaaagaatggtcattatctcattagggacagaattgcttagggaggcccgacactgtggctcaatccggacacggtgactataatcccagcattttgggaggctgaggtgggcggatcacctgaggtcaggagttcgagaccagcccggccaacatggtgaaacccccgtctctactaaaaatacaaaaattagccgggcatggtggcaggcgcctggaatcccagctactcgggaggctgaggcagaaaagaattgcttgaacccaggaggtggaggttgcagtgagccgagattgcaccactgcactgtccaacctgggtgacagagcaaggcttcgtctcaaaaaaaagaaaaaaaaaaaagacttaaggacttgatttatggtcctaaacacagttttcctaggctccctcacagctggcaactccactttgcccctctgggcctttgagagctcccttctttacatttcttagttcagggatcaccacagcttaaaacttaatggtttggaaacaagaattcctttcccttcttagaagaccttctcttctcaggtttcagttttctggtggtttagccaggtcatcctgtgtattgagatcaagatcagacctccaatccaaaaattccagctttggctttggtggggaaaagcatgtttacttagtctggagcagtgaaatcctagactttggatttcagagctgtaaagtttccagaaaaaaaaaatgttgagaccaggcacagtggctcatgcttgtagtcccagcactttgagaggccaaggcggatgggtcacttgagcccaggagtttgagaccagcctgggcaacatggtgaggccccatgtcatgtaaaaattagccaggcatggtggtgcatacctgtagtaccggtgactcaggaggctgaggtaggagtatcacttgagcctgggagttcgaggtatgataatgtctgtgaacagctactggactccagcctgggcaacacagccagaccccgtttaaaaaaaaaagtcaaccaaccccagttgtagagtcccaagcagtggttctcaaacttgaagtacatcagaatcacctggagggcttgttaaaacaccacgtgctgcatctcaccccacagtttcttattcattaggtctaaggtgggaagccaagaatttgcatatctaacaagtttccaggtgatactgaaggtgctggcctggaaccacaattgggctagagaggaagaaaacatataatttattcatggaattgccagctggttagtcttagaaatttgacggtaaagccctccttctccctcaccccactttctattgatcaacaaatgctgccaattagtaataatgtgataactacattatcaagcattactaggtgccacatgctatgataaacattttacatggattatctcatttaatcctcacaataaccctgtgaagtaaggtattagtatagtcattttacagataagcaacctgaggtagaggttaaataacacacagccactaaacgggagaactgtgattgctatttgcagtttcacaccagaaactttgctcttaacagctgagtctcctcctgtcattccctctatatccccatactactagtatcttaaccactcatcatctcacacctgcactaacagccttcaagttggcctccggcttttggtgcagagacgcaaatattgaagttagctttcagatacacaaatctaatcattctatactttggtggaaatcctctgatgtttcaccaaggctgataaattatacattccttaactgggccttcagaccttcataatctggtctcaatctgttttatcccctacatgccccactatccagaactacactccaatgaacttctcccattttctacagttacatcctattttttttttgaaacggagttgcgctcttctcacccagactagagtgcagtggtgagatctcggctcactgcaacctccgccttctgggtttgagtgattctcctgtcttgccttagcctccctattaggagggactacaggcacatgccaccacgcccagctaatttttttttttgagacagagtctgtctcccaggctggagtgcagtggcgcgatctcggctcactgcaagctctgcctcccaggttcatgccattctgcctcagcctcccaagtagctgggactacaggcgtctgccagtacgcccagctattttttttaatttttagtagagacggggtttcaccgtcttagccaggatggtcttgatctcctgacctcgtgatctgcccgcctcggcctcccaaagtgctgggattacaggtgtgagccactgtgcccagctgcaatgttcttacctctgcctgaaatgtcctttgatctcaaccttcaaggcccacctcagttgtcacttcctccttaattccttccagatggtatgttcaaatttgttcctagacaaatttactcttctctaggtttcactattttattagagacagagtcttgctctatcaaccaggctggagttcagcagtgtgatcatagctcactataacctcagcctctcgggctcaaacaatcctcccgccttagcctcccaagtagctaggactacaggcatgcaccacaatgctcggctaatttttttttttttttttgagacagagcctcactctgctacccaggctggagtgcagtgacttgatcttggctcactgcaacctctgcctcccaggttcaagcgattctcctgtctcagcatcctgtgtagccgagattacaggtgtgcgccaccacatctggctaatttttgtttgtttgtttgtttgagatgggagtcttgctgtgtcgcccaggctggagtgcgatggcacgatctcgactcactgcaacctccgcctctcaggttcaagcgattctcctgcctcagcctcccgagtagctgggattacaggcatccaccaccatgcccagctaatttttgcatttttagtagagacggggtttcatcacgttggccaggctggtctcaaactcctgacctcaggtgatccgcctgcctcggcctcctaaagtgctgggattacaggcatgagccaccgcacccgaccaaacgttatgaccacaaagggactcaaaccctcaatcttctgatctgaagtcagacaccttatccattaaggccacacggtctcctactctaatttttggatttttagtagagactgggggtttcaccatgttggccaggctggtctcaaactcctcacctcaagcgatctgcctgcctcggcctcccaaagtgctaggattacaggtgtgagccaccagacccagccataatttttaaattttttgtagagacagggtctcactatgttgcccaggcttgtcccaaacgcctggcttcaggtgatcctcatgccttggcctcccaaagtgttgagattacaggcgtgagccaccacacccggccctattttttaatagaactgccaccctcagtcaagctaaaggtcaaaggtaggtagatgctttctcttaatatatctaaacagctcatttaatcatttaaccaatatttattaaatgcctactttgtggcaggtatggttctaggtgctgaggatatggcagtaacaaaacatgaagcagcccagtgctgtggctcacacttttaatcccagcactttgggaggctgaggcaggtggatctctcgaggtcaagagtttgataccagcctggtcaacatggcgaaaccctgtctctactaaaaacacaaaaattagccaggcgtggtggtgcacgcctgtaatcccagctacttgggcagccgaggcagaacagtcacttgaacctgggaggcagaggttgcggtgagccgagattacaccactgcactccagcctgggtaagagtgagactccgtcttaaaaaacaaacaaaccccccaaaactatgaagtttacattgtagtgggggaggataaggtaataaggtaaattagaggtaatacatgctaaggagaaaaatcaagcaaaaaaagggaagaggcggtttggagaaggctgtgagtatacatagcgggggccaaaggtctcagctgacatacagtaaagagctgaaggaggtgagggaggaagtcatgtggacatctgaaggaagagggatctaggtagagggaacagcaactgcaagggcctgaaggggccaacagaaaggagtgaataacagtagaaactaaagtcagagagcagtaccagggagccagatcctacaagccttaatgattttacttttactccaagtgagatgggaagccatgagagggttctgagtagagaaagatcatgatcttactcccatcttaccaggaccactgtggctgctgagtagacttaagtgatggaaggcaaaggttgaaactgagagaccaattacagttactgcaattaaaacaagtgagataggattgtgtggcagaggccagggtggaagttgtggaggtgttgagaaactgtgggattttggacatacatatacatatatatatatatatatatatatatatatatatatgtatttttttttttttttgagatggagtctccctctgtcactcaggctggagtgcagtggtgggatctcggctgactgcaagctctgcctcccgggttcaccccattctcctgcctcagcctcccgagtagctgggactacaggcccctgccaccaggctcggctaaatttttttttttttttgagacggactctcactctgtcgccaggctggagtgcagtggcgcgatctcggctcactgcaagctctgcctcctgggttcacgccattctcctgcctcagcctcccgagtagctgggactacaagcgcccgccaccatgcttggctaattttttgtatttttagtagagacggggtttcgccatgttagccaggatggtctcgatctcctgaccttgtgatccgcccacctcggcctcccagagtgctggggtaacaggcacgagccacgacgtccagccttggacatacattttgaaaggcaatggggtgacaaagagaggaagactgggctgggcgcggtggcttacgcctgtaatcccagctttgggtggctgaggtgagcggatcatgaggtcaggagtttgagaccagcctgaccaacatggtgaaaccccgtctctactaaaaatacaaaaattagctgggcatggtggtgcatgcctgtaatcccagctactctggaggctgaggcaggagaatcgcttgaacccgggaggtggagaggttgcagtgggctgagattgtgccactgcactccagcctgggcaacagagcaagactccgtctcaaaaaaaaaaaaaaaaaagagtaagactgtagaagtggtatttgggtgtttgggtgggaggaattcgggagcttgatttttagatgtaagtttgaaatacctaggccgggcgcggtggttcacacctgtaatcccagcactctgggaggccgaggcgggcagatcacgaggtcaggagatgagaccatcctgactaacacagtgaaaccacgtctctactaaaaaatacaaaaaattagccaggcgtagtggcaggcgcctgtagtcccagctactggggaggctgaggcagaatggcgtgaacccgggaggagctcgcagtgagccgagatcgtgccactgcactccagcactccagcctgggcaacagagcaagactccacctcaaaaaaaagaaatacctattagacatccaactgggtatgtatactagacagttggatatatgattctggagttaggggatgagtccagaaagaaatataaattacggagctgtcagcgtagagatggtgcagaaagtcttgacgctgaaggctgggcacagtggctcactcctataatcccagcactttgggacgcccaggtgggaggatcgcttgagcgagttcaataccagcctgggcaacaaaggctggtattacaaaggcccgtctctacaaaaaaataaaaagttagccaggtgtggcagcccaagcctgttgtcccagctacttaggagactgaggtgggaggatcacttgagccctggaggttgaggctgcagtgaaccataattgtgccactgtactctagccttggggacacagcaagaccccagtgccacaaacacacaagccttgacatggaaagagatcaccacattctatgtgccctctcatccctgctcactccattacttggtgtccctaagctcaatacttcccttgctgatctgaggccatacagtctggtgaaagagggccggactcttggcttcttaacacattcacatacgtttgtttaaaatttccagtgtttcatgctttcagcccacaaagcacagacacagttttaatgagaggttttcacatcaggccagagaatgtcagtcttctccatctccatagagattttaaaaagcacacctcagacaaaaaagaaaaacaagcaattaagactatttcagggctgggcacggtggctcacacctgtaatcccaccactttgggaggccgaggcgggcggatcacctgaagtcgggagttccagaccagcctgaccaaggagaaatcctgtctctactaaaaatacaaaattagctgggcgtggtggcgcgtgactgtaatcccagctactcgggaggctgaggcaggagaatcgcttgaaccccggaggcggaggttgcagtgagctgaatttcaccattgcactccagcctgggcgacagagtgagaatccgtctcaaaaaaaaaaaacgtttttttcacaaggaattctgaggacttgttggctcaattgcttggacataaagacacacatacatgaagctggagagataggaagaagcgctcaacacagaacaccctaagtatccctactccctttcaaggactaaatcccttcagagatttcctttgcttcagtccttcaggagcctcccgaagatgctaggagtcgtttaagaaggctggaagatggccgttgggaaggaactgttggtagctggcaatacttcatcccaaggaggcggtggcaatagctccctgggcagcagacatcatggattttcctccctctgggaaccagaggtccctccgtttctggtttgaatcccttagagacaaagaacttcattctctcccatacccgcgtgggactgctggggaggagagggggtggaggggttagacttctacccccatgaaacacccgcgggctcaaagaggagcctggatcctgactggtccaggaggcgtgcggggccgcggggcccctccggcttgggccaggcgcgttgccaagatgcccggggaaggggccgcccggcgcaggccggggacgtggagcgctcggggcgctcccacgtaggccacacattggccgcctgtatcctccttctttcctctcaactccattctctcgcgcttttttcccggggagcctccgctttccccttcttcccgcggccgccctcgcccttcttccccctccagaccctcccccggctcgcccctccctcggcagcccaccttcaccccgctcctccgcgcgctcctcggtcctcgcccctcagccccggcctcccctcgccggcccccggcccccgcggtcccctccctgcccccctcgaggcggcggcggcccctttcacaatagcgcggcccgcctccctcctctcggctcccggtgcactcccgcccgctcccctccccgcgcatgcgtcctccggttggcggcggctgcggcggtggcggctacgagcggctccgtttttttaaagggaaacgctgaggcgccgggggtgactgtgggggagggggaccccgagccgcggagacccccgggagaggcgacagaccccctctcccggagtaggagggctttgggcggacccagccctccaccccctcctgaggaggaggggggggaaatggaggctcggggcggttgaggcgagctccggggcggggggccggggcggggaagggggggtgcggggtggggagacgaggcgggcccggccgggccagggggggccgaagcgagctccggggatgagctcgggggcggctgggtgcgagctcctgcctctgaggcgaaggcggcggcggcggcagcagaggcggcggcgaggcccccatgggccggcggcgggcctcagccgcggcctccacgtctccgcacgccggcgggatggcgcccgggccccggaggagccgcgctagcggaggcctgctgccgcgctgctgaggcgagcccgccaaactcccctcccccccctcagtcctcgaccccccgcacctcgccccttccccaccccctcctccgcctcggtgcccggcgctgctccggaccactatgaccatgagatccgcggtgttcaaggcggccgcggcccctgccggcggcaatcctgagcagcgactggactacgagcgggctgcggcgctgggcgggcccgaggacgagcctggggcggccgaagcccacttcctcccccggcaccgtaagctcaaggagccggggcccccgctggcctcctcccagggcgggagccccgcgccttccccggccggctgcggcggcaagggccggggcttgttactcccggccggggcggcccccgggcagcaggaagagagctggggcggttcggtgcccttgccctgtccgcccccggccaccaagcaagccggcattgggggggagcctgccgcagccggagccggctgcagcccccggcccaagtatcaggcggtgctgcccattcagacgggctctctcgtggcggcggccaaagagcctacgccctgggctggggacaagggtggggcggcctcccccgctgccaccgcctcggacccggcgggacccccaccactacctctgcccgggccgccacccctcgcgcccaccgccaccgccgggaccctggcggccagcgagggcagatggaagagtatgaggaagagccctctcgggggtggtggcggctcgggagcctccagtcaggccgcctgcctcaaacagatccttctgctgcaattggacctcatcgaacagcagcagcagcagctgcaggccaaggaaaaggagatcgaggagctgaagtcagagagagacacggtacgggaggggttaatctgcattcgggccgaggagcgagttgtgcgcatgctcgggggaagggggctgtaggaggttaaggcacccccgggttaggggtaaaggaggttggccaccggcaaaggagtatcttaggcgctgggtctctgggagccaggctcacagacacgttgggttggagggaagggttaaagggcaacctctcagggggagggggaggggtttcaggtgccaaagggttaatttaaaatgacagccccagacgtgtgggaaagacgtttagtggaaaaagacgtgatctgtgaggggttaaaaatgaaagggtggggtgtaggtgttgtgtccttatggaagggttaaattaaagagctattgcgttagaaatgcacggtggaggagagggctgtagcaagcagctgttgctttcaccactgctgcagcatctttagataggagggcagtaggccttttagtgggcacaggggtagaggtgatttacgtggaatcctattttagttttcttaaatgatattaagagaatcactgcctttgatttcagacagcttttaataggaacctgagttctaatacatgacccactgaccaggtcccttttataagcatggtgtttgaaactggaagattttagggcatcaggggaaagtaagcttattaaatgtattaaatagacctccccatccttattttagaatcttagggagtaggaaagtcgtttattatttctttacttctgaggagcttggacgacacaggcttgtttttactgcagcagtagttaagggcatctctgcgttaaaacatattccttcagatatgagggaagctggggtggggggtattactgtgctagcataccttacagctgcctaaaaataaacatggtttctacaattgttgtgttcaggctgcagcagtctctctctccctctctccctccctcttcctccctccctgtctctttccctttctctctctctctctctccctccctccccgccgtcctcatctctccctctctcctctttctctctggcgtcgtgtgcgctaagagctgagcaagggagcaagcggctattcattttgtttgctttccaaatgaatctcatcgggtggctgttttattggagaatgcattctgcaaggtggattgggagctggggcaggtctcattaaaatatctcatggtgttgatttgtggaagttactcaacatggaggtggcactgctcagactgtactgcagtctaggggtgtgatggtaccgtaattacaacacatcatatccttgtatggggggagtgggaagagaaggaccagtgaaggagaaaaaaatcaaggaaatgtcacccacaaatggtggttaagggctgtgaatcaaaacatatacaaggagatgaaatgagagtatggctgataggggggttctctgctgattgtggaggtttctgctcagttcctgaggtaatggcccctttgcaggctttcctagtcaggaaaagtggggtgagttaaggatagagtgtcagtctgaacttggtactcactgcttctgttgtgtattgcaatcttaatattgcttaagcttgtttcacttattccagttgttgtttggccttgtctgaaatctatgcaatgaatgtaatgaaggcagcgttaaacatcactgtctaacccagataaaattcttgtaatagagtataagtagcacaacaccttttctcaaaactaaactaacacaaagttttcaatactaatagagttccattttctgtttagttttttagtccttccttttaactaaaactaaaggaactttgattttaataaatatttagatgaataggtataattttttgtgttacctcaaattcaaaggaatgtgtttatgtcatgattgttggaattatgggtactgatttctattttccaaatgaaatgttcattgttttaaaagtaccccctcccacacatacccctttcaaataacactgccattcctggtggcactgtatgagctcttaattccttctcaatgtactgtttgcactttgctgttgtgtatagagctttggagtagaagtagagaggatagaatttggacaatctcagggcctcttaaaagatcatgtaggctgggcgcggtggctcacgcctgtaatcccagcactttgggaggcctacgcaggtggaccacgaggtcaagagatagagaccatcctggccaacatggtgaaaccctgtctctactaaaaatacaaaaattacccggtgtggtggcgggcgcctgaaataccagctactcgggaggctgaggcagggaggcggaggttgcagtgagccattgcaatccagcctgggcaacaagagcaaaactccgtctcaaaacaaaaacaaaaacaaacaaacaaaacatgtatacaattaattctggaaactcccgaaccaacttggagccacacaggtagcagtagcagagaccatgccattaaaaggcatgttacggcccttcccagtggagaggatctccctacagaagaatgaactacaaattaccccatgcctcttcccatctaggttagcccttaaaatttaacagtataccttctcttctctattttgtttaaggaaaactgttcagattaatgtctgcctatttaaaaagttgagttgatgtggtccatagaaagaggcagaagactatactgattcctaaatggggctaagtatctgtgtgtttaattttttatgtgttaagtctgcattttgctactctctcttttagctccttgctcggattgaacgtatggaaaggcggatgcagctggtaaagaaggataacgagaaagaaaggcacaagctgtttcagggctatgaaactgaagagagagaggaaacagagctatctgagaaaattaaactggagtgccagccggagctttccgagacatcccagactctgcctcccaagcccttctcatgtgggcggagtggaaagggacataaaaggtgtgctgataactttgtttgatgaggacccttgttaccagtgattgagagtaggagattgggatttatgaattggttttatagcaatcataacttgctttagaagtcttctatgcggagggccgggtgtggtggctcacacctgtaatcccagcactttgggaggccaaggcgggtggatcatgaggtcaagagatagagaccatcctggccaacattttgaaaccccgtctctactaaaaatataaaaaattagccgggcgtgatggcgggcgcctgtagtcccagctactcgggaggctgaggcaggagaatcacttgaacccgggaggcggaggttgcagtgagccgggattgctccactgcactccagcctggcaacagagcgagactccgtcaaaaaaaaaaaaaaaagaagtcttctatgctgagaaactatcttgaaacattcttatgcagactgtaaaagtctgtttaggagtattttggtcacagtaataattattgaatgcagcttacatcataaagagaatgggcaataagtatgacagctgagtttcttaaaactatagcagttcacttcaagttaggaagtgttaaattccttcattgtgtcgtgcattggtagacatagaaaagtaaaatacaggccaggcgtggtggctcatgcctgtaatccctttgagagggcaaggtggggaaggagtatggaacgtatggaaagtggggaaggagggatcgcttgcgcccaggagtttgagaccagcctgggcaacatagtgagacctcatttttacaaaaaatccaaaaattagccgggcctggaggtatgcacctgtagtcccagctactcaggaggttgaggctacagtgagctgttactgcaccactgcactccagcctgggtgacggagtgataccctgtctcaattgaaaaaaaaaaaaaaaaaggtaaaaatggaactgtccttggactcaaagaaattagcccaactgtaaggataggcatacattttgaaaactcagaattcaaatgcagtaaaatacgtagatgtacaacacctgatataaactaaggctttttgtttgtttgagatagggtctctctctgtcacccaggctggggtgcaagtgtcgccaacatggctcacttcatcttccacctcttggactcaagtgatcctcctacttcagcctcccatgtagctaggaccataggcactcaccatgcttggctaactttttttagtttttgtagagacaggctctcactttgtttcccaggctgatctcaaactcctgggctcaagtgatcctcccgaagtgctgggattacagacattaaactaagttttgtaagattcagggatattaaaagttattctgggttagaattgtgaaactttaagtagaaatcagtcttgaaaaagaagtatagccgggtgcggtggctcacgcctgtaatcccagcactttgggaggccgaggcgggtggatcacgaggtcaggagatcgagaccatcctggctaacacggtgaaaccctgtctctactaaaaatagaaaaattagccgggtgtggtgcatacacctgtagtcccagctacttgggaggctgaggcaggagaattgcttgaacccaggaggtggaggttgcagtaagcagagatcgcaccactgcactccactctgggtgacagagtgagactccaaaaaagtattaaaatttaggttggtaaagaggaagggagatgactttcttgggatgtggtgggggaagaagggaagaagaaagaggctagagaatgccagcagacagtaagaaaaaggaaataaaggttacaattaatgtggtacagggttgggggaaaaggaaagagactgatctctggattacaagaagtaggtgcacctaatgtgggttgtagtggtacataatgttggctaaaggaccttgaatattctttttttttttttttttttttctgagacagagtctcactctgtcgcccaggctggagtgcagtggcgtgatctcagctcactgcaacctctgcctcccagggtcaagcgattctcctgcctcagcctctcaagtagctaggattacaggcatgtgccaccacgcctgactaatttttgtattttttttttttagtagagacggggtttcaccatattgaccaggctggtctcgaactcctgacctcaagtgatccgcctgcattggccttccaaagtgctgggattacaggcgtgagccactgcgcctggtggaccttgaatattcttaagcatggaaattccttgttcaacatttactggccaggtgcagtggctcatgccggtaatcccagcactttgggaggcctaggtgggtggatcacctgaggtcaggtatttgagaccagtctgaccaatatggtgaaaccctgcctttattaaaaatacaaaaaaaattaaccaggcatggtggtgtatgcctgtaatcccagctactcaggaggctgagataggagaattgcttgaacccgggaggcagagattgcagtgagccgagatcatgccactgcactccagcttgggtgacagagcaagactctgtctcaaaaacaaaacaaaacaaaacaaaaaatttactatgggcctattttatatactgctaagcctgggctgttcctgctcatgactgctaaatgagcaccagacatttaggtacctgaatacttgtcattttggggcaaaagaaccagcttattcttttgctccagaatgtgttcaaattagattttattcaagtgtcaataaattttataatgttttcttccctatctaataggaaatccccatttggaagtacagaaagaaagactcctgttaaaaagctggctcctgaattttcaaaagtcaaaacaaaaactcctaagcactctcctattaaagaggaaccctgtggttccttatctgaaactgtttgtaaacgtgaattgaggagccaagaaaccccagaaaagccccggtcttcagtggacaccccaccaagactctccactccccaaaagggacccagcacccatcccaaggagaaagccttctcaagtgagatagaagatttgccgtacctttccaccacagaaatgtatttgtgtcgttggcaccagcctcccccatcaccgttaccattacgggaatcctctccaaagaaggaggagactgtagcaagtaaggcatagagaacacttgctcttataccctagtggtggcggtcaagctaacaagtgtgaaaatgcctttggcatttttaaaaaagtgcaatcaataaagcagagttctgtcaagaatgagtaagttaacagccagagacagacactgtgcaggcattgcaaatagatggaattacagcaaaatgtgctcaatgtatttgcctgcttacaacactgggagatgtgtttgccagtaagttgctcatcacaagagcaccagacttgggggtgtaatctccggcaacttgcatgccctctgaaagaagggttttctgtgctgtgaaatgcatagaactatactttgccatgcacgactgttcctgcaattgatattgtgtgaaatctgggagggtggtctttgggtgttctcaggggccaatggtaatttttgggttggggagccagcttggggtggggaattttcacctgggcctccgctctttaactatataaacatttatctgtatatctatgtccctgtctggggggcaggaggaatctgccaaagaccaacagtcttactttatcttactatacttcacaaaggttctaaaatgtgaagagtttacttggattgcagtagcccattggttgttcatatatttaaataaaatggtctacaaactatttttcaaacaataaggactatcttgggatatctgagctgcttggggagggtgtggggtgtgggaccttggtcttcattcccttttttttttctttatggcttccacacagagatgctcccctatcttctacatcaaccagtaactggaatgtgccttcaatcatgtaatattagtctatgtcagtcactgcggttactctggggtaatggttggggaggccttctaggatagagccgcagtcccaagtttctaccactgtgtcttgcctagcaggatggggatagaaatccattccagtgagacaagagcgttctccaggctttgtttggctgttctggtgacaaaattaagtgggaaagctagattagtcgtcttaatgatctaacctctattaggcctcacacttgagtacatgagatagatcaggatcctgatctaggttcagatttttgttggttcagtcagttgaacaggttcttccttaatggttaacctcttttgctgccatggcaatgctgcgtaacaacttaagagaaacgtgaagcaacttcccatccgggattgggtaatggcttggtccagagctgttctgtgtgactggctatttttgaaaatcctttcttccctagtacagacaatttcaaacacctctgagattgtgggcatagtgaaacaaaggagtctaattggggagatcccagccccttgaggagcctgagttgtgaataaacatgtgaatccttattcttgatgcccctatctcaagaggaaggctcaatggcttgttctaggggagccaaagtctttgtgcatgttgttcaggctggaccagcaaggtagtttgtttggagggaggagggagctgtttaagaagactacatatgtaagttttgagaacactgatcttttatttgaaaaatagggtcaacttttactcacctgccatgttctgagtttaaggtttgatatccttggccatcaactgttgcagggaaaccaccctaaataatgaagaaaagaagtcgtctcagtgtaaaaaaaaaaagtggtgggcttattttcttttcttttgtctgttgttccctcttcccctcccccagagagaaattctcaaaagaacaactcaaaaaacaaaatggcttcctagtgagaacttcagtgatgatcctttcctccatttggggtatgggctttttttctttttacactgagattattcttctttcctgcattatttagggtgtctgatgccatcaagtgttgcaggagaaacttcagtcttggctggtgagtagaataggaattgtgctggctgggcctggggtgggggttggtgggatggtggatggttgggagctgcattccccatccactggatgtgggagactgagatttcttggtgtatgattgattacactactatagacttcaaaatgacaacaaatttcagttgtttttcaggaactgctatagcatcattatatgaattgtcaggtattggtttagggtttttgtgatcctgagtttggcagactgcaatggcattttaggttcttttataccatagcaaggacactgaatatggcttcagggaggccatagaatggattcctatcacttggtaactttgtctcttctggggagagacctcttatcctagtgaatagttgtgcaactttggatttaagggtggttccacccctcctccctttctttttctctctcttttttttcagttccttcttggagggaccactcagtagagcctctaagggacccaaatccttcagaccttttggaggtaggtaaccaagagcactcaattgaagagagtaagagattaaatagaatgtgagggtataactggaaaatgtcatagtactatggatgaattaaataattttaaggccagacagaaacttgagaaattatctagtccagctccttcattttatagattaaaaaacaggtctagagtagttaagtgatttattaaaaaataaatagctaggtaatgttcaaaacaaaggtagattttatgctaagtagaaaagttagggctgggtgtggtggcttacgcctataatcccagcactttgggaggctgagacaggtggatcacctgaggtcaggagtcagagatcagcctggccaatgtggtgaaaccccatctccactaaaaatacaaaaattagccgggcgtggtggcgcacacctgtaatcccagctactcgggaggctgagacagggagaattgcttgaacccaggaggcagaggttgcagtgagccaagatcgcaccactgcactccagcctgggtgacggagtgactccatcacacacacacaaaaaaaagcatgtacccctcaaccataaaattacatattccaagctcatttgactcttaaagttttgattattttaaagtcagactcttacaaagtatggaggcagggagggtttatgacagtctgggggttttagtttgatgtgatgtttaccttggaaagatatggaaatgattttgaaatttggagattctaaaaggatgtggatggggaaaggagtatgtgttttgttgattctgttaccaggaggttcccatactgtccatggaacccacagactcaggtagaaccggaaggtgaaagattttacgttcctggaagctggaaattagttagtatatgtgtgtaactaatatatggtgataaatagcttatcagctgcttttctttacacagaacctggatgacagtgtgttttcgaagcggcatgcaaaactggagctggatgagaagagaaggaaaaggtgaggccagagatgtccatcctggaaacaactgagccctaggacctaggacagagtatcagggaacctgacctccctttttcatgctgtggagaatcttggagtgcttaacactcttacattactggcttcccagttggttgaatatcttagttggaaatggtagttgttgcggtaaacatgtttggcctctttttgtgtatgaccttcctcaattctactttctgtggaacaccaacacatgatctaaacggtagacctaaacagctctcccttaacaaggcagtcatttctctttaccctgtctagaggagtcagcaagggtcttcctagcatctggattgtgtgagttgcttttatagagcaggttttgggtaaacagtaatgttgggtttctttgttttgtttggtttgtttttcccagatgggatattcagaggatcagggaacaaagaattttacagcgactgcagctcagaatgtataaaaagaaaggaattcaggaatctgagcctgaggttacctcatttttccctgagccagatgatggtaagttgtgtccatctaaaagagtaggtttttgaaagaaggaggagggtgcaaggctccagggtacaacttgctctgaatgaatgaagtgtattttggagcagatatagcttctagacatttcccatctgtattactaatacgctcccgtttgactttctcccatagttgaaagtttgatgattacccccttcttgcctgttgtagcatttggacgaccattaccaaaattaactccacagtaagtatacattttttttctccccttccaggtaacctgcacatccttttcagacttcatggaagcctagatatgaggtggaaccaggtggcttagggatagccatgggtctttgacagaaatgaggctacctgggcaactagcttttgtaataagattcccaagccaataattaggagtattgctttttgagttagaaatagatgattccatcactttaatggtacacagttgctctggctttgaggcaggaaagacactccaaactagtcagggataggagtggtaagggacatagtgacttttttgtagttgctatcatgtccacactgaatcccttctagtcttgcaagttgatttcctcatccttttttgccaggaattttgagctaccctggttggatgagcgtagccgatgcagattggagatccagaagaagcaaacacctcaccggacgtgtaggaaatagctgtgctggcaagaaccctgtcttcagatagttgtagcatgccattcccgagagtggcagagacctgtatatgtgacctttgtcctcacatatgttatcactcgctgataataccctttcatacttccttgactttgttttcattactctgatttcacaaaaactctttcattcggctaattgtgagttatggagggtgattgggatttcttttcccttttttgggaaatgggctctcaagctaaagctataggatggcagattcagaagtttcaggggtctgtttctatacatttgcctatgttaaaggggtaaaagggctctcttcattagacatgtggaagatgaagcagccccttcctttagagctgtgcctgcatggcactcttctcaccctggtacaccctccttatagtgggtatagtgatttttaaccctaaaataaaacaaacaacctcaccatgagctttaggaccagaagaggaatgacaagtgaagcgatgaagcaagccatcttcacagagtagaaaagacatcggagagttggtagataactgtctgaaaagatagttgttcatttgaaactattctgtgatacagtcatgtgggaagggatgtttggctgtgattattttttcagttaatggataacaatttctttactgctcaaaaaccaaaatctttggaaaagaaagtggggatggttagtttcagaacaagttacagctgtaaacaaaagcacttagtatttgggatggcatgccaaaacctgtataaatgtccttgtatcacatcacttctcaagtattccttcattgggcttcatccttttagcagaactcttggtggtgggatagagacttagggagggtagggggagagtgtggaaataggtgcttcctttggctggcaaatgtctacatcttgaaacaaacagatgtacctaatgagcttctccattcactttgtaaaaataatttgtatgtgtaccatcttggtcctctcccctcccgttttgttaaaatatcaggatagcactcccaggccactttggtctcagtgtaagatccctattaactatctgaaaggaaaatagagccaagacctctggtctcaaatatataggaattgcctttctttagtcttcaggactattgtgtgaaaacaagtaggggtctaatctcctagaaggtaggggcttttatccttaaagagaatatgtccccagattattagcacttttagaggagaagccaaggtatgtagggtgtgtggctggcccatcagtggagcacgaagagagaatgggataccattgtgggaagagaagaaaagttcctcaggggcctcccactgctaaagttttttgtgagatgttgatctgtgcttcctggatttgacttttaaaggaattattctggcagcacatgtagtattcttggatgatcttgctgctcttatttctccttttgtgtgtgtgtgtgtgtgtgtgtggctatgggttttcatttgtaactccatctgcttaggagagtgggctctctataagggaacctgctgtaaacttcattgcagcaaggatgtagagagaaataggacttaattccactaggggctctcatctcacaccttaaggaggagatttctagaaaaactgggccagattttctttgttctccatcattttaatgtggcaggctgttcagttttcttactcttacctatgtgatatttcttcgtaacgtgtccaaaaagaaaaaagacccaatcagtgtctcttgactttgttctttgatccctcagtttcttcttgatttcagcatgtgtcgggttcctaattttgggtatgagttagcaaatttaaccattgtgtttgtgccctacccaggggactccccagtttctgacttgaagtagactgagaagaatccacgaggtgctatctggccagatttaagtagattctatttccttggttctccctctccctgaggacctcttattttattgtcccctcttctaggttaattctcctttgatttgactttgttgagaaggaggttggacagtagattagcaaagttccaagtgcaaaattacagtgtgttagagtgtggggggaaaattagtcttatttttccctacatgggatacaacactgtgaattcaatcttcaactgaaggccctgcagttctcctaaaacatagttgtttgtttttctttaacaaagtttaagctagtgttaataaattaaaaaaaattgcttgtctgtctacttcagctttgttttatgcccatttcatattgttgtctgtgttgtaattcataacttttgataccatttctgatgtgtaaaattggttgtcttgtaaatatcttataaagagttcaattgtaaataaactattgtggctgttaatttttgaacttctgcttcaatttattatatttattggcaaacaaacaattctgcttgtatatttgaaacattggaaaaagaaatccattttctcaataaaaaagaataacacattattttcccctttataataaggtactcacttccatttgtgtataagtataatgtatgtttcatccctctttgtccagtgtacttccttaagtataatcagcaacttggctgggcgcagtggctcacacctgtgatcccagcactttggtggctgaggtgggcagatcacttgtggtcagaggttcaagaccagcctggccaacacagtaaaacatggtaaaaccccatctactaaaaatacaaaaattatccagatgtggtggcatgcacctgttatcccagttacttgggaggctgaggcaggaaaatctcttgaacctgggaagtggaagttgtggtaagccaagatcaagctgctgcacttcagcctgggtgacagcgagactccatcccacccacccccaacaaaaaaaaagggtcgggcgtgttggctcacatttgtaatcccagccactttgggagactgaggtgggtagatcacctgaggtcagaagttcgaaaccagcttggccaacacggtgaaaccctgtctctactaaaaataaaataaattagccaggcttggtgacaggcacctgtaatcccagctactcgggaggctgaggcaggagaattgcttgaacccaggaggcagaggttgcagtgagccgagatcatgccattgcactccagcctgggtgatagagggagactccaactccaaaaaaaaaaaagtataattagcaattttagaaacgagattataggatacttcgtaagttaacaaaatcttatagctggaaagacattagaggtcatctagtgtgaccccgatatgtgatttacccttgataacactccagacaagcaaattccaggctgtgcttcaacactttttctacatacatttttccccctaagtgtttgaaaattcttgcttgttgacaaaaaatctaacttcttgtaacttaaactcactggtttttgctttgccttctaggatgatgaaaaaaagaccaatccctcctttcttcatagtccctagttaaagattgctgtgggctccaggcccggcgcggtggctcaggcctgtaatcccagcactttgggaggccaaggcgggtggatcacgaggtcaggagttcaagagcagcctgaccaacatggtgaaaccccgtctctactaaaaatacaaaaattagctgggcgtggtggtgcgcgcctgtaatcccagctacacaggaggctgaggcaggagaatcgcttgaacctgaaaggcggaggttgcagtgagcccagatcgcaccactccactccagcctgggcgacagagcgagactccgtccccctcaaaaaaaaaaaaaaaaactggacccagactaaacaactgaaggacaaagtggcagactatcactttccttatttagacactaaacttggcagccttatttgcaccaatttagtctgtgatcgataagatcctccaggttctttttctttaacacttattaaatcatattatcctccattttgaactcaggcagttggcttttggagctggacttataagttgtcacgtttggccacttgtctaattagctgagattgtttgaattttctttttttcttttttttgaaacagaatctctttgtctcccaggctggagtgcagtggcgcgatctcggctcactgcaagctccgcctaccgggttcacgccattctgcctcagcctcccgaatagctgggactacaggcgcctgccaccacgcccgtctatttttttttatttttagtagagacggggtttcaccgtgttagccaggatggtcttgatctcctgacctcgtgatctgcccgcctcggcctcccaaagtgctaggattacaggcgtgagccaccgcgcccggccttgaattttcctttcatctctgaaggcattcataattacttccagtttcatgttatctataaatttgataaacatcaggatccttaaccatgtcatttataaaaattttactcaggaaaggccgggcgcggtggctcacgcctgtaatcccagcactttgggaggccaagaacggcggatcacgaggtcaggagatcgagaccatcctggctaacacggtgaaacctcatctctactaaaaacataaaaagttagtcgggcctggcggcagacacctgtagtcccagctactcgggaggctgaggcaggagaatggcgtgaacccgggagacggagctttcagtgggccgagatcaccccactgcaccccagcctgggcgacagacagagtgagactccctctcaaaaaaaaaaaaaatattttactcagggaagaattctatgccatggtggcctttgtttgataacatacattattaacgtgcactcctgtaggtgcactaaaaacttagctcatgcactttgtatatccttataatggtccaaagaaaacacactgattcttttcaatggtggccaatgccttgccaaaatgaaataatttccataaaccttaagaaggaaataatgtcaggattttgaatcaacatctgtttctactgaccatttatttttaaataggttctaaaatcctgacaagggcagtagctcatgcctgtagtcccagcactttgggaggctgagacgaaaggatcgcttgatcccagccaggagacaagcctgggcaagagcgagaccccatctctacaaaaaacagaaaaattagccgggtgtggtagtgtgtgcccgttgtcccaactactaaggaagctaaggcaaggaggtcacctgtgcctgggaggtcaaggctgcagtgagccgcgctactgcactccagcctgggcaacagagtgagaccctgcctcgaaaaagccaaaacaaaaccggtaatactggcatcataccagcctgcactttgggacaggtgatggctggggtgggaagaaacgtgaagaggaaatgagaacacagagaaaacgctgcaacaagaagtcctctggcttcactgcagacaactggtttctccttcgcccgttatcttaaacaaggctggtgcagcaaatctgacgcagcactacagcttttaagatttaccttgattcgtgattttaccaagcaaaggaatgcagtaaattgacctgcttcaaacgtaggtagaagtgagaaatggaaacagaaaaccatgaaacagccctagtgttgcagtgaagctgtgacaggttgactccttccactcgggaagcccaagatggccgggccaggaacccgggaggctgctgaagtctcaattcccctcgccctaggcctgcccaagggaagtcaggagccgcgccacgcccccttacatcaccgatagacgtaatccgggtcggccgcaaacgtgccgcaggcctaggccccgcccagtgccccgcccctcccccaacacacacacacacacacacacacacacacaccccaacacacacacacacaccccaacacacacacacacacacacacacacacacacacacacacacacacacacacacacagcgggatggccgagcgccgcacgcgtagcacgccgggactagctatccagcctcccagcagcctctgcgacgggcgcggtgcgtaagtacctcgccggtggtggccgttctccgtaagatggcggaccggcggcggcagcgcgcttcgcaagacaccgaggacgaggaatctggtgcttcgggctccgacagcggcggctccccgttgcggggaggcgggagctgcagcggtagcgccggaggcggcggcagcggctctctgccttcacagcgcggaggccgaaccggggcccttcatctgcggcgggtggagagcgggggcgccaagagtgctgaggagtcggagtgtgtgagtgcgcgcaggcggggcggggtggggaccgggcggcgagccggccgggggcggggtgtaggtgatgctaggtagtctgtgagttgatagtagatactgggacttttttttgtttttgagagaaaaggggagttatcccaatgcgagtttgcatccggagttccaagggaagaagaaggattgggggtttctgggaggatggtagagccgctggagatggaaagcggatgttttattcagaagtcggggctggagggaaggagaccagacctgccttggctactacttgataaagatttacctatctctgtctccctctccaaccattttgtgctgaatcttcagcttttcacccacatttctttattgggctccccacctctggaaatcacagaactaacccatgtcttctgctttctttcaggagagtgaagatggcattgaaggtgatggtgagtagcatcttttaccccattaggacaagagttttttttaacataaactcaggtcatctatttccaacatcgacattctcacacactgtcacggatttagggccacagagtgcctttttgtaacatagtggttaagagcataggctttagcagtatagtcttcagcaagttaccctctgagcctgtttctccttttgtaagtggggactataattttatccacgttgtaggttgatgtcagaattaaatgagactcttagtctgacctgtaataagcagccaaaaaatgtttctgggtttctttttttccacatatttctgttttatttcagctgttctctcggattatgaaagtgcagaagactcggaagtgagtatgacaggttttttcctatggtatagatcagaaatgctttttaaaaacgtgtacacaccttcgttgcaaacgtaccatgacctccgtgtttatcctcttgtgtattcttcatttatgcttctgaaaaagtgttacagaaggtcttgttcactttagacctagggaaaacttggggcacgccgtctcaagccacaggtgttatactgttagttggcttctcttcctgtctgaagaatatgaggttctaaataagagagtgaggatatcttgaagtcctctgaaagatgtttgacagtttgttttatgcagtgtaggttgagaagccagccaattggttatttttttccaaatctatctgaagactttgaaagggtaggattcggaatgttttgtgccaagagcatccatcattttataggtggggatttttctgtttttaggagaaagtttcctgtcttttggataaactactagagatgccatcagagtaagtgtttgtttcctgggttgttgagtggactcctgagttctggtaatgggattatatatagggggaattggatggtggatcaaagattttgtctatacatttttagaactgttactacattttagaatctgttaagcccttgaggatggaatagtgaacactataacaaaattcctatctttagagatcttacaactcaataaggaagtcagacaaacattcaagcaattgtaccacttgctgataggggatagcactgggatagggctaagtagggtgttacagctgggtactgaatccatcttaggcagtcgggaaagattaaacagttggctgggtaagatgtgttctaggcagagagaacaacagtcaagaaagcccacaggggccgggagcagtggctcacgcctgtaatcccagcactttggaaggctgaggcagacggatcacttgaggccaggagtttgagaccaacgtggccaaaatggtgaaactccatctctggcccggcgcggtggctcacgcctataatcccagcactttgtgaggcccaggcgggcggatcacgaggtcaggagatcgaaaccgtcctggctaacatggtgaaaccccgtccctactaaaaatacaaaaaaaaataataataaattagctgggcgtggtggcgggcgcctgtagtcccagctactcgggaggctgaggcaggaaaatggtgtgaatccgggaggcggagcttgcagtgagctgagattgtgccactgcactccagcctgggtgacagagcaagactccgtctcaaaaaaaaaaacccatctctactaaaaaatacaaaaattagcttggtgtggtgatgcatgcctgtaatcgcagctacttgggaggctgagacacgaaaatcgtttgatcccaggagatggaggtggcagtgagctgaaatcatgccactgcactgctacctgggtgacagagtgagactctgtctcaaaaaaaaaaaaataaataaataaaagaaaggctgtaggggtacaaaaagaatagtaattagaatgaataagatctaaacccagcgcgatggctcacacctgtaatcccagcactgtgggaggccaaggtgggccagtcacttgaggctaggaggtcaagaccagcctggccaacatggcaaaactccatctctactaaaaatacaaaaattagcagctcatggtcccgcatgcctgtaattccagctactcaagtggctgaggcaggagaatcccttgagcctgggaggtggaggtggcagtgagccataatcacaccactgtactccagcctgggcaacagagcaagactcttgtctcagaaaatttaaaaaataaaaatgactaagatctagaatttcatatttgcaacatggtgactacagtcaaccagtaacttattgtacatttaaaaataactattggctgggcacagtggctcatgcctgtaatcccagcacttcgggaggctgaggtgggtggataacaaggtcaagagattgagaccatcctggccaacatggtgaaatctcgtctctactaaaaatacaaaaattagctgggcgtgcttgcacgcccctgtagtcccagctactcaggaggctgaggcaggagaatcgcttgaatccgggaggcagaggttgcagtgagccgaaatcaagccactgcactccagcctggtgacagggcaagactccatctcaaaaaaaaagtatatatatatattaataaaagaacgtaattgaattgtttgtaacaaaggataaatgcttgaggcgatccataccccatttacccttacatgattattacacattgtatatctatataaaaatatctcatgggccgggcttggtggctcacacctgtaatcccagcactttgggaggccgaggcgggtgaatcacctgcggtcaggagttcgagactagcctggccaacatggcgaaacccattttcagtctctactgaaaataagaaaaattaagtaggcgtggtggcaggtgcctgtaatcccagcgactcaggaggctgaggcaggagaatcacttgaacccaggaggtggaggttgcagtgagccaagattgtgccattgcacttcatcctgggcaacaagagggaaactctgtctcaaaaaacaaaaacaaaaacaaaactcatgtactacataaatatatacctactgtgtactcaacaaaaattaaaaactttctttttctttttttttttttgcttgagatggagtcttgctctgtaacccaggcaagagtgcagtggcatgatcttagctcgctgcaacctccacctcccgggttcaagcgattctcctgtctcagcttcccaagtagctgggattacaggtgcacaccaccacacccagctaatttttgtatttgtagtagagacggggttttaccatgttggccaggctggtcatgaactcgtgaactcaggtgatccgtccgcctcagcttcccaaagtaccgggattacaggtggattacgggtgtgagccactgtgcccagccctcttttttttttttttttttttttaaaaaagaggcagggtctcactctgttgcccagtcacccaggctggagtgcagttgtggggtcacagctcactgcaacctcaaactgctgggttcaaccagtcctcctgccttgacctcctgaagtgctgagattacaagcatgagccaccatacccagccaaaaaaaaaaaaaaattaagttttttttttttttattgagatggagtattgctctgttacccaggctggagtgcaatggctcgatctcagctcactgcaacctctgcctcctgggttcaagcgattctcctgcctcagcctcccgagtagctgggattataggcgcatgccaccacgcccgcctaatttttgtgtttttagtagagatggggtttcaccatgttggtcaagctggtctcgaactcctgacctcaggtgacccacccacctcggcctcccaaggtgctgggattacaggcatgagccaccgtgccccccattttttttgttttgttttgttttgttttttaagacggagtctcattccgttgccaggctggagtgcggtggtgcaatctcggctcactgcagcctccgccccgcctggttcaagtgatttctcctgcctcagcctcccgagtagctgggactacaggtgtgcaccaccacgctcagctaatttttgtatttttagtagagacggggttccaccatgttggccaggatggtctccatctcttgacgtcgtgatccacccacctcggcctcccaaagtgctgggattacaggcgtgagctactgcgcctggcccaaaatttttttaaaaagagaaaaagcccagatagagaagatagagagcgtttgggaacttgggagtaattaggtgtgactggagcattgttgggacaggataggtattagaaataaagacaaattggtgagcaggggccactaattggtgaggtgggaggattgcttgagcctgggaagtgaaggttgcagtgaatcaagattgtatcactgtactccagcctgggcaacagagcaagaccctgtgtcaaaaaaaaaaagtgatgcgattggatttatttattcattttttaaaaatttttatttactgttttttgtttgtttgtttttttaatttttagtagagatggggtttcaccatgttggcaaggctggtctcgaactcctgacctcaagtgatctgccggtcttggtttttcaaagtgctgggattacaagcatgagccactatgctttgtctgatttaaattttaaagatgtgtttttcagatccagagaacacttgcatcagaaaatccaattagccattctctactgaaacagactcttgggaggggcattggagactcagacatttatgtattaaagaatatcccaggttgatgctatgtactgtaaaatttgaggattcttttatagcagttattttgtccacagtgaagagaaacaagatcagagacagaaaagctagttaagaaagctattgtaggaatctagttaagtagtgagtgtggcatggaatagagtggtgatagtgaaaatagaagtggacagaattcagagttagaagtggttttgggatggggaatatttgctgcagtacagatgctttttgatttatggtgtagttacatcccatcctggtaaacccatcataagttcagaagttcaagataacttcttggctaacttggagcagcaactctctgttgctatccagcatctcgagaagtacgatttctttttttttttttttttctttttttaagacagagtctcactctgtctcactctgtctgcagtggcgtgatctcagctcactgcaacctctgcctcccgggttcaagcgattctcgtgcctcagcctcccaagtagctgggattacaggcgcacgccaccatgcctggctgattttttttgtatttttagtagagacggggtttcatcatgttggacaggctggtcttgaactcttgacctggtgatccgcctgcctcggcctcccaaagtgctgggattacaggcatgagccacagtgcctggcctcttttttatttttttaaaaatatttttaatagagatgaggtcactctgtgttgcccaggctgatcttgaactggactcaagggatcctcccaccttggcctcccaaagtgctgggattacatgtgtggtgagccactgcacccagctgagaagtacagtttctactgaatgtttatggctttcataccaccataaagtcaaaattataagttgaaccatcatacatcagggaccgtctgtagtcactagagaatggaaacgttggagaaactgacaggcaatatggagtgttcattgagttttggggattgtgaatttatagcagcttaccattctatatgtaagggagtttggatgttttcctaatggctaggaaagaagtaccactgaaggcttaaatgtgggggatgaattgtgggtgaggcacaaaggaagactagaggcagaagagctgtttagaggttgttaggatagtccaaggagcatgacgatggtgcccctaaagaaggttcatacttgttggaatggcaagatgtgggacagattagagagagattctagtgtactaacaaccccttcattgattgaatgtggaacctaaattaaggagtcaaaggaggccaggtaccttggctcatgcctgtaatcacagcattttgggaggctgaggcaggtggattgcttgagcccaggagcctgagacccacctgggcaacatggaaaaatcctgtctctacaaaagaaaagtagaaaaaaaaattatccggtcttggtggcgcaggcctgtggtcccagctactgaggaggttcaggcaggaggatcatctaagcccagggaggtcaaagcagtagagctgtgatcactccacagcactccagcctggacaacaaagtgagaccctgactcagaaaaagaaaaaggagtcaaaggaatgtgcaggttgatgaatggtgttgaatggtgttaactgttaaggaagggaccccaggagaagagttctggaaggacagttgtgggttaggttttggatgttttgagatcgagaaggtgtgggacttttaggtggtgatacctggtaaatagtttttgattcctaattgctcatacctttctgagttctcatttcatttttgagtttttccaattctgattgatgttctttcatgccttatataattttcttaatgtctttttagcttattttgaaatagaagttgcaattttgatatgatatgcggatgtctttctggcatgctttcattgtctgtaggaatgctattattttttcttattataactttatgggatttaacttctgtattttctgttcatttttatgtaaaattagttttcctggtcttttcgaaggaagcatgatttagaatagctttttctaacttcacagagctgcttctgttgtttttctgtggtggtgagaaatatggtggcttgctttctgagatttgttgcttttgttccctttcccagcttgttctggaccatccctgtcctactgaatttggtcctgctctcaacagtttctcttctaggaactcccttctagggacagtgtagggccctgtccccagaaggaagccctggcagccaggtcagcttcatcccttcagaccttttttttttttaagacagagtctcactctgtcgcccagactggagtgcagtggcgcaatctcagctaactgcaatctccgtctcctgggttcaagcgattctcctgccttagcctcctgagtagctgggacctcgtgtgtcaccgtgcccagctaatttttgtatttttagtagagatgaggtttcaccatgttttccaggctggtctcgaactcctgactcagatgatccacccaccttggcctcccaaagtgatgggattacaggcatgagccaccgtgtgtggcccccttgctagttgtaagtgctgttctcagttttgactgttgtgctttcccttgactgcctgttgattatttcagtgttctcctgttctcaggtccatttgctttctctctgctttctcctgcgtggacaccagtactatacaggtcctacagctgttggtgctttgttatgcacttacattttgggtcttgggggatacctggtaacttaactttgttgcagtgttgtctgaaggttttggtttcttttttattttttgagacagagtcttgctgtcgcccaggctggagtgcagtggctttgccttccagattcaagctattcttgtgcctcagcctcctgcgtagctgggattacaggtgcgtgccaccatgcctggctaatttttgcatttttagtagagacgcggttttaccatgttggccaggctggtctcgaactcctggtctcaggtgatccacccacctcggcttcccaaagtgttgggattatggacgtgagccactgtgtctggccagggttttggtttgggtctcggttttgctgtccagagctctcattccatgtggagatttgaagagagataaaactgtgccactgccattttctgagagtcttccaagaattcttttttttttttttttggcaaatgggtctccttattttgcccaagctgagcttgaacttgaacttacaatcctcatcagcctcttgaatagctgagacaataggttcatgccactgtgcctggccaaaaaaacttgttaaagaaatttgactgagggaaggctgaagagatggtagttggagaggtagctttgagatcaagaggtgatttggatgttttttaaaaagttaggagagtatcaaataaggtcaaagattgaaaaaaagaaaagaaagggggaaaaaagagagggaatagataatgatattgagtactggtatttttgactgagtatatgagaaaaagtaggaaccagacaagattaacatcttccattgtaattacagagaagtgggaaggaaaggtatgtgcaaaggaagattagaaaggagggaaaagctgggtgcggtggctcacgcctgtaatcccggcactttgggaggccgaggcgggcagatcacgaggtcaggagatcgagaccatcctggctaacatggtgaaaccccgtctctactaaaaatacaaaaaattagccgggcatggtggcgggcacttgagcctgggcgacagagcgagactccgtctcaaaaaaaagggaaaaaaaagagggaatagataataatattaagtactggtattcttgactaagtacatgagaagatgtaggaaccagatgagaagtatcttccattgtaattacaaagaagtgggaaggaaaggaagttagcgttcctttctgtgttttgtttttgtgaaatagaaggatagagcaggacaggcacggtggctcacacctgtaatccaagcactttgggaggccaaggcaggaggattgcttgagcccaggaatttgagaccaatctgggcaacaaagtgagaccctctctctacaaaaaatcaacctggcgcagtgatgtgtgcttatgtcccagctacttgggagcttggagtgggaggatcccttgagcccaggaggtcgaggccacagcaagctatgattgcaccactgcactccaccctgggtaacagtgtgagactctcgaaaaaaacaaaagaatgacatctgcttcaaaaagtaagagtgtgtgcgtgtgtgtgtgtgtgtgtgtgtgtgtgtgtaaccccctttggcaatggagtagtctgttgtaggcctggagaaagcagacatttgaattgatccagttccaggcatatgggagtggcaagagaaatgggatgttactagtagtgattgaaatgaatgagctatggagtctagagagagaagaaagtgaatgtgagaaaggactgataggcagaagttagaagcatcaagggaatggatgcattgaaaaattagagacgagacagtaaggaaacaactaggaataagaggcatttttttaaaaaactgctttattgtggcaaggcgccgaggctcatgcctttatcccagcactttgggaggctaaggcaggcagatcacgaggtcaggagatcgagatcatcctggctaacacggtgaaaccccgtctctactaaaaatacaaaaaacttagccagatgtggtggcgggcacctgtagtcccagccactcgggaggctgaggcaggagaatggtgtgaacccgggaggtggagcttgcagtgagccgagatcacgccactgcactccagcctgggcgacagagtgagactccctctcaaaaaagaaaaaaagaaaaaaaactgctttattgagatacaattcacagaacgtacagttcatttatttataaagtgcataatttagccaggtgcgtgcctgtactcagctactcaggaggctgaggcaggaggaatggtcggcccaggagttcgagaccagcctgggcaacatagtgagacctcatctctttttatttgtttgtgtgtttgtttttgagacagagtcttgctctgtcacccagtctggagtgcagtggcacaatcttggttcactgcaacttgaccctctggggttcaagtgattctcgttcgtcagcctcccggatagctgaggttacaggtatgtgccatatgcctgcctaatttttagtatttttagtagagatggaattttgtcattttggccaggctggtctcaaactcccagtctcaagtgatctacccacctcagcttcccaaagtgctgggattacaggcgtaagtcaccacgcctggcccgtaagaccttatctctataaaaaataaaaaatttagccaggcgtggtggcgtgcacctgtagtcccagctacttggcaagctgaggcaggagaattgtttgagcccaggaggtcaaggctgcagggagctgtgatcataccactgcactccagcttgagtaacagagtgagaccttcatctcaaaaaaaaaaaaaaaaaaaaggaaggaagaaacccagttctcccatccttcccgtagcctcaagcaaccgcaaatctactttctgtctctgttgattttcctattctggcctttcatatgaatggaattatgtaatatgtagatttatgtgtctggcctctttcagtataatgttttcatctgacttgtagcatgtatcagtacttcattccttctttctgcctccccaccccagctttattgaggtataactcacaaataaaaattgtatacatttaacacatacagtgtggcatcttgatatatgtgtacattgtggagtaccacagttaagctaattaacgtatctatcacctcacctagttaacctttttgtatgtgtgtgatgagaacaccgaagagctactctcagcacatttcaagtttacaatatgttatttatttttattttacatggtttaaaaagagacagaacctttgtcacccaagctggagttcagtgatgcagttatagctcactgcaacctcaaactcctgggcttaagcaatcctcccacctcagcctcctcaatagctgggactacaggcgtgcactaccatgcccagctaatttatttatttgtttttatttttattttttttttgagacggagtttcactcttgttgcccaggctggagtgcagtggcatgatctcagctcactgcagcctctgcctcctgggttcaagcggttctcctgcctaagcctcccaagtagctgagattacagtcatgcgccaccaagcccagctagttttgtatttttagtagaggtggagtttctccatgttggtcaggctggtctcgagctcccgacctcaggtgatccacccactcagcctctcaaagtgctgggattacaggcgtgagccaccatgcccagccgcccagctaatttttaaacaaattttttgtagaggcaaagaatcgctgtattgcccaggctggtcttgaactcagcttcaagcaatcctccagcctcagcttcccaaagtattaggattacaggcatgagccaccatgcctgaccaagtatacagtacgctattattattattattttagacagtcttgctctgtagcccaggctggagtgcagtgttacaatctcggctcactgcagtctctgcctcccaggttcaagcaattcttctgcctcagcctcctgagtagttgggattacaagcgcccaccaccacgcccggctaatttttttatttttagtagagacagggtttcaccatgttgcccaggctggtctcgaactcctgacctcatgatctgcccacctcggcctcccaaagtgctgggattacaggtgtgagccaccacgcccaaccagtaagttattattaactatggttaccatgctgtacattaggtctccagaacttataactgaagttttatatccttttaccacgatctcattttcgctacccttaagccctagaaacccccttcctactctctgtttctatgagtttgacttgagatcatgtggtggttatctttctgtgtctagcttattttacttagcatagttccgtctaggttcatccatttgttgtcacaaatgtcaaaattttttttttagggcagaattagattccattgttcgtgtgttccacattttctttatccattcacccaacaacagacacgagttatttccatagcttatttccatcttttggttattatgaataattctgctacaaacattagtgtacatgtttttatggggacatatgttttcacttctttttgactatgtacctaggaatggaattgctgagtcatgtggtaactctgtaatcatttgaggaactagaaccgccatactgtttccaaggtgctgcaccattttacgtgactagcagcagtgtatgagggttccagtttctctatatccttaacagcacttgttgtgttatttacccaggtgcatgcctgtactctcagctactcaggaggctgtggcagtaggatttcttgggcccaggagttcgagaccagcttgggcaacatagacctgtctaaaactttttttttttggcggggcacggtggctcacgcctataatcccagcactttgggaggccgagtcagacggatcacttgagatcaggagttccagaccagccttgctaacatggcgaaacctcgtctctgctaaaaatgcaaaaattagccagccactgtggcacgcgcctgtaatcccagctattcaggtggctgaggcataagaatcacttgaacccgggaggtagaggttgcagtgagccgatttgattctagatgtcctattaggtatgagatgttttctcattctgatttgcatttccctgatgactaatgatgctgagcgtttttttttttttttttttttggtgcttattggccatttgtgtatcttccttgaagaaatgactattcagatacctaggcaattttttaaaaattaatttttaattattgtttttattttttttagagacaaggtcttgctgtattatccagagtggtctcaaactcctgggctcaagcaagcagtcttcccacctcagcctcctcagtagttgagactataggcatcagccaccacacttgatctttgcccaaagtagctgggattacaggtgtgcgctgccatgcccggctaatttttgtatttttagtagagacgaggttttgccatgttggccaggctggtcttgaactcctgacctcaggtgatctgcccacctcagcctcccaaagtgctgggattacaggtgtgagccactgcgcttggccatttttttttttttaattgagatgtaagagttctctatatattctgtattctagatgtaagtcccttatcagatatgatttgcaaatatgtgttccctttctgtggattgttcactttctttatagtgttctttcaaggacaaaggttttagttttgatgaagcctggtttatgtttttccttttgttgcagatgcttttggtgttaggtatctaagagtcatttgccaaactgagagtcatgagtatttactcctgtgttttcttctaagagttttatagtttcaactcttaaatttaggtctttgattcattttgagttagtttttatatgtggggtaaagtaagggtctaacttcattctttttgttttttgagatggagtctcgctctttcacccaggctggagtgcagtggcgctatctaggttcactgcaagctctgcctcccgggttcatgccattctcctgcctcagcctcccgagtagctgggactacaggcacccgccaccacgcccagctgattttttgtatttttagtagagatggggtttcaccgtgttagccaggatgatctcgatctcctgacctcgtgatctacccatcttggcctcccaaaatgctgggattacaggcatgagccactgcgcctggccaacttcattcttttgcacgtgacgattttggtccatgactcgggtgtttatacgtaaggttttattttgttttgttttgtttttttgagatggagtctcattctgtcacccagcctggagtgcagtgtcgctatcttggctcactgcaacctctgtctcctgggttcaggcgattctcctgcctcagcctcccgggtggctaggattacaggcatgagccaccacgctcagctaattatatttaaggttttaaaagtggagcagttttacttataataaagcatagcagttctaggtaagactggtttggagtgcagccatggaaatggatggctgaagtgcaggtgaagactgacctcagtgctaaagtcttcctgtcaacgacaggcccgtggcctcggaggagccggggtttattaaaatgaggctagaggagttagatctgaaagagacattgagaataaggataccaactccatctcttagtctgaaatatgtgggaagtagaagaatgagctaaaacttctgtattagaatttttcaaaggaacagttccttcagggtggagctagtaagaattggaaagagtacactgaaatggtgggtgatgtaggggagtttgtctcttctggaaaaaggttttgatgacatccctttgccaaagcagtgtgaccgtgtggtagcaccttggcttcagttagactaagctttgactaatttggagcctcctcagtactatgctatttgtatctgttctgccctggaaacaaaattagtttttcacttaaaataaagttgccttatttgacatcctaccacagatcagagggtggagcataaaacaagctttccttattaatcatgtgataatactatttaaaggtatttgaattaaatcagtacgtgtgtgtagggagatggagaattaaagtcacatacaccaagttattgtaatttctgcttgaaaatcttcagggaacataggatcaaggaaagaactgaatgattgccacctacccatcctagtcttgaggaggaaaaacttcatgtaattaagggaaatgggaagaatcaatggtgctcagttgttaaaaagctataggtaaaggcttgattctgatagtgtgggtatagtcaaacagtctccctctattctgttacctttctgagagtcctaacccaaaacactcaaggccaaaatagttaacctttgaacggccaggcgcggtggctcatgcctataatcccagcattttgggaggccgagacaggcggatcatgaggtcaggagatcgagaccatcctggctaacacgatgaaaccccgtctctactgaaaatacaaaaaataattagccgggcatggtggcgggcgcctgtagtcccacctacttgggaggctgaggcaggagaatggcatgaacccgggaggcggagcttgcagtgagccgagatccagccactgcactccagctggggcgacagagtgagactccgtttcaataaaaaaaaattaaaaaaataaaatagttgacctttggacaacatgggagttaagagtgcctatcctgtctgggtacagtcactcatgcttctaatctgagcactttagtgggccaaggcaggaggatcacttgagtccaagagtttgagactagcctggacaagaaagcaagaccctgtctctacaaaaaaaaggacaaaaattagctgggcatgatggcacgtgcctgcagtcccagctactcaggaggctgaggcaggaggatcactcgagcccgggagtttgaggctgcagcaagccatgatcacaccactacactctaccctgagtgatacagtgagaccccatctgttaaaaaaataaaagggggttggccgggcgcggtggctcacgcctgtaatcccagcactttgggaggccgaggcgggtggatcacgaggtcaggagatcgagaccatcctggctaacatggtgaaaccccgtctctactaaaaatacaaaaaattagccaggtttggtggcgggtgcgtgtagtcccagctactcgggaggctgaggcaggagaatggcgtgaacctgggaggcagagtttgcagtgagctgagattgcaccactacattccagcctggacaacagcgagactccgtctcaaataaataaataaataaataaataaattaattaattaattaattaaaaggggctgggcgtggtgcctcatgcctgtaatcccagcacctcaggaggccgaggtgggcggcttgcctgagctcaggactttgagaccagcctgggcaacatggtgaaaccttatctctactaaaagtacgaaaatagctgggagtggtggcatacgcctgtagtccctgctactcaggaggctgaggcataagaattgcttgaacccaggaggtggaggttgcagtgagctgagatcgcgccattgcactccagcctgggcgacagagcaagactctgtctccaaaataaataaataataaataaaatataaaggacacctatccctgttgcagtaagaattccaagtataacttttgactcacccaaaacttaactactaagtcaactggaagccataccaataacataaacagtcagtgaatatgtattttatattttatgtgtattatgtactgtactcttacaatgaagctagagaaaagaaaatgttattaagaaatcattcactattaaggaaacatactattcagtggaagtggatcatcataaaggtcttcatcatctttgcattgagtagacttcagaagaggaggggttgatcttgctgccttgggtgacagaggcagtggaaggagaggcaggcatacttgctgcaacttctattgaaaaaaaatttgcgtagaagtggacctgagtagttcaaaccccttgttccagcgtcaactatacccagatgctgagcagggaaaaatgaggaagagggattaattggcttgtctgggccaatcaggctgactcagctctatttgaagagatggcagaaacttagagtttgagagtttctcaatcaggaattcaggaatctcatgttgagcctctttgaccagattattggggccagcctgggtcttgagtgacagggcagtctggttcagttcaagtatcagacccagtaggtgagtgagagaccagtgtacatacatctaccaggtttcagatgtaacccaccaatgaagactagaccacctttccttgaacccatttctctgtgttctcgtaggcctccctagccatagctctgcctccttaggtccaaatctggggaggacaaggagaggagagtaaccctattctaaagccagttcccttatcatgagccttagctgctgccttttcctacctagaactagccacacgtccatttcctggccctttctaatggcctaatgatcctttgtgtgtagacccagcactttctgtgtcatgaacagtgttacccaatcttgatgtggtaaaagagggaagaagatagtaaaaagagagagagagcacttggactaatttttttcatttctgaaatgtgatggttgtacaagttgtcctttaaggttttttaggtcaaatttttgtaattatgtgattctggatatgttctggctgcaggaattttctgctgcagaaaaccagtactcataggcattaaaaaaagctaccattttccagcttgaggataagtgcattgggaaatcatggagtcattatcaagagtttgcacatctggttgggcgcagtggctcatgcctgtaatcctagcactttgggaggctgaggcaggaggttcgcttgagctcagaagtttcagaccagcctgggtaatgtggtgaaactctgtctctacaaaaaatacaaaaattagttgggcatagtggtgtacatctgtagtcccagctacttgtgggggctgaggtgggaggattacttgagcccaggaagtcaaggctatagtcagttgagatcacaccactgcactccagcctgggcgacagagtgagaccctgtctcaaaaaagagttgcatgtctactcattcagttctcattatctatagactaaaatatacatctccccccttatgtactactatttttgaatatatgtaaattaataaaatgtaaacttaaagtgttattgaatgtataacagtttgttgttttttgtttgtttttgagacagtctctgttgtccaggttggagtgcagtggtgcgatctcggttcactgcaacctctgcctcccaggttaaagtgattctcccgcctcagcctcctgagtagctgggactacaggcacgcacgcatcagttcattgtgtgtttttttttttttttttttgagacaggatctctctctgttgctaagactggagcgcagtggcacaattatggctcactgcaacctctacctcctgggctgaaatgatctcacacctcagcctcccaagttgctgggactataggcgcacaccaccattcctggcgaatttttttttttttttttttttttttgacagggtctcactcttttgcccagactagtatcagtggtgcaatcttggctcactgcaacctccacctcctgggtttaagcaattctcttgcctcagcctcccaaatagctgggattacaaattcatgccaccatgtctggctgatttttgtatttttagtagagacagggtttcaccatgttggccaggctggtctcaaactccggacctcaagtgatccacctacctcggcctcccagagtgttgggattacaggcgtgaaccactacatccagcctagcagttgtttgtcattgtatgttttctcagtgaatatctcatggggatccatgaaaatttttagatcctaaaaaggggtccgcataatcaaaaaggttgggaatttctgctctaagccattttgagatgggagagttcacaacttacgtcaaagtatagttattaggcactgcatgtttaagagacaattcatgggccaggtacagtgttcatgcctgtaatcccagccctttgggaggccaagggaggaggattgcttgagctcagcagtttgagaactgcctaggcaacatagcgagacctcgtctctactaaaaataaaaaaaaatcagccaggtgtggtggcatgtgcctgtagtcgcagctacttgggaggctgaggtgggaggatcacttgagcccaggagattgagattgcagtaagccatgattgtgccactgcactcctgggcaacagagcaagaccctgtctcaaaacagaaaaaaaaaaaaagataattcatggagagagagattatcaaggaagattaagctcctcttatatgttaggtatcgtatagtaagtctcccttccattcttatcctctgggcccattagaggctgccgctgtttttttgtttttttgttttgctttttcgagatggagttttgcttttgtcacccaggctggagtgcagtggcacaaacttggctcactgcaacctccgcctcccggctaatttttgtatttttagtagagacagagtttcaccatgttggccaggctggtctcgaactcctgacctcaagtgatacgcctgcctcggcctcccaaagtgctgggattacaggtgtaagccactgcgcccagcctgccacttttaataattcttgcatatgttccaggaatacctatgtggatatatatgtatgtatgtgtgtattttttttaatgtgatatttttaaaatagtgtcttttttttattattactattttttgcgacagagccttgctctgtcgcccaggctgaagtgcagtggcgcagtctctgctcactgcaagctctgcctccctggttcaaacgattttcctgcctcagcctcccgagcagctgggattacaggtgcctaccaccaagtgcggctaattcttatatttctagtagagatggggttttgccatgctggccaggttggtctcacactcctgaccgcaggtgatctgcctgcattggcctcccaaaatgtgattacaggcgtgagccactgtgccaggccaaaataggatctttattttctagaaatatgggtaagaatattgatttgtttgcttttcagttctatgttgtactaaaaatttattgataaatgtattcctaaagagtagaaaattgaaatgcagccaggcacggtggctcacgcctataaacccagcactttgggcggccaaggcaggcagatcacgaaatcaggagttcaagaccagcctggccaacatggtgaaacctggtctctactaaacatacaaaaattagccaggcgcggtagtgggcgcctataatcccagctatttaggaggctgaggcaggagaattgcttgacccctggaggcagaggttacagtgagctgagattgtgccactgtattccagcctgggtgacagagactttgttttggggttgggggcaggggtgggaattaaaatgcaccgttcagatcttatatgcatcgctgacagggaaacttttttcagggtgaagaaggtgaatacagtgaagaggaaaactccaaagtggagctgaaatcagaagctaatgatgctgttaattcttcaacaaaagaagagaagggagaagaaaagcctgacaccaaaagcactgtgactggagagaggcaaagtggggacggacaggttagtacattccacagtcctccattttagaggctggaatagagattcttgaggcttggaagagtaaggatccctttatctgtcctctaggagagcacagagcctgtggagaacaaagtgggtaaaaagggccctaagcatttggatgatgatgaagatcggaagaatccagcatacatacctcggaaagggctcttctttgagcatgatcttcgagggcaaactcaggaggaggaagtcaggtaaaagccacttgctgctgctgctgtctaacatgtattttacacatgtaggccaggtacttcgatttgcctgtatttcatttattacagcattttaagataagtattatgattatccttatcgtacaaatgaggaaagtaggcttagaatatttggtaactcttggtgaggcagctaagatacagacctaggacagtttgtttccagaactcatcttctcttaattattatacttttgcttttcttagtctgaggtgtaaggcgtctgagaagtgaaatacttgcataggttgccttttaggagaaaggagatgtttcaaaggtactgaatggcatgaaatgaagtctttttctcatttctgtgtctgttatatttgagcccagcaggccctgaggttctgtgattcacgcttgctttggggaggcctgttttttataatctctttgggatgatgaggagactacgtaaagttcctattgtccccctgcctccctgacccattttgttcaagaacatctctacttggagaattctgctgacccaagacacttttccttcattttatccagacccaaggggcgtcagcgaaagctatggaaggatgagggtcgctgggagcatgacaagttccgggaagatgagcaggccccaaagtcccgacaggagctcattgctctttatggttatgacattcgctcagctcataatcctgatgacatcaaacctcgaagaatccggaaaccccggtgaggacattttagaacataagaccaggctgggtatggtggcttacggtggcttacacctggaatcccggcactttgggaggctgaggcaggaggattgcttgaggccaggagttcaagaccagcctggggaacatagtgagaccctgtctccaaaaaaaaaaagaaaaaaaggaaaaaaaaaatagagtgtagactcttgatatcttttagaaagaattctctttgcttttctttttatttatttatttaagacagagtctcgctgtgttgcctaggctggagtgcaatggcatgttctcggctcactgcaacctccacctcttgggttgaagtgattctcctgcttcagcctcctgagtagccaggattacaggcgcgtactatcgcgatcggctaatttttgtatttttagtagaaatgaggtttcgctatgttggccaggctggtcttgaactcctggcctcaagtgatctgcccgtctcgatctcccaaagtgctgggattacaggcctgagccaccgcgcgtagcctccttttgttaatttcctaacagtttcttcattccattttttgtagatatgggagtcctccacaaagagatccaaactggaacggtgagcggctaaacaagtctcatcgccaccagggtcttgggggcaccctaccaccaaggacatttattaacaggaatgctgcaggtaccggccgtatgtctgcacccaggaattattctcgatctgggggcttcaaggaaggtcgtgctggttttaggcctgtggaagctggtgggcagcatggtggccggtctggtgagactgttaagcatgagattagttaccggtcacggcgcctagagcagacttctgtgagggatccatctccagaagcagatgctccagtgcttggcagtcctgagaaggaagaggcagcctcagagccaccagctgctgctcctgatgctgcaccaccaccccctgataggcccattgagaagaaatcctattcccgggcaagaagaactcgaaccaaagttggagatgcagtcaagcttgcagaggaggtgccccctcctcctgaaggactgattccagcacctccagtcccagaaaccaccccaactccacctactaagactgggacctgggaagctccggtggattctagtacaagtggacttgagcaagatgtggcacaactaaatatagcagaacagaattggagtccggggcagccttctttcctgcaaccacgggaacttcgaggtaggtatcataggattggtggctagctttttcccctttgcatcatcaggtttaggggcatgggacttctgtctcaggaaggtggtgtctgacaaatgtctacttctttttttttgagacagagtctcactcttttgcccaggctggagtgcagtggcgcgattttggctcactgcaaccttcgcctcccaggttcaagtgattctcctgcctcagcctcctgagtagctggggttacaggcgcacaccaccacgcccagctaatttttttttttgtatttttatttatttatttgttttgagatggagtcttgctctgttgcctaagctagatgcagtggcacgatctcggctcactgtaatgtccacctccgggttcaagtgattctcctgcctcagcctcccgagtagctgggagtataggcgtgcactaccacgctgggctaatttttgtatttttagtagagaccgggtttcaccatgttggccaggatggtcttgatctcttgaccttgtgatcctcccaccttggcttcccaaagtgccgggattacaggtgtgagccacagccaccgtgcctggcctttttttttttttttttttttttgtgacagagacttgctctgttgcccaggctggagtgcagtggcacgatcttggctcactacaacctctgcgtccagggctcaaacaattctcctgcctcagcctcctgagtagctgggattacaggctctcaccaccacacctggctaattttttttttttttttttgagacagagtctcactgttgcccaggctggagtgcagtggtgtgatctcggctcactgcaagctctgcctcctgggttcacgccattctcctgcctcagcctcctgaatagctgggactacaggcgcccaccaccgcgactggctagtttttttttttgtatttttagtagagacggtttcaccgtgttagccaggatggtctcgatctcctgacctcgtgatccgcccaccttggcctcccagagtgctgggattacaggcatgagccaccgtgcctggcccacacctaatttttgtatttttcatagagatggggtttcattatgttggccaggctggtctcgaactcctgaccttaagtgatcgacccatcttggcctcccagagtgctgggattacaggcgtgagccactgtgccagccccagctaatttttaaaaaattttttgtagtgatgggtcttgctatattgcccaggctaatcttgaactcctgggctcaagagatcctcctaaagcgctgggattacagatggaagacactgcacctgcccggtcatcattgagcctcctgagtacaggatcattttccacaaaaagtagaagaagacaacgttattatttgaactaatggttaaatatttgaaggcagaaatttattcagttgaattttgatcaagatcttctctaatatatttgaaaggcaagcctcccttatttccttaatcttctagagacagattgcccaatagaactttgtgtaatgattgtacttttgtgtttttgttgttgttgtgtttacatagatatagtttttttttttgtttttttttttttttagatgggtcccactttgtcacccaggctagagtctggagtgcagtagcgtgaccttggctcactgcaacctccgcctccagggctcaagcaatcctcccatctcagcctcctcagtagctaagatcataagcacacatcattacacctggctgattttttttattttttgaaaagacggggggtctcactgtgttttccaggctggtcttgaactcctgggctcaagcagtcttacctctgccacccagagtgctgggcttataagcatgagccactgcatccagccggaattgaacttttaattaattgaaacttaagtgtccacatttggttagtggatatcatattgggcagcatagttttagagagtaagacctacctattacccattttgcctattgtggtttgtttttctccagccagatagatcaaaggatcttcccttagtctgaaatctaacttaaatattggaactcctcaattggagttgcagcacccttcttactattggaggacaatctctagaacattcctttttgtcttgagtcattttagccagaggagaatctcctttcaaacttccaacccagacccctgtgaatggatataatcaagtagatttacaaagcatccctcccttgtccagctgttgctcagaaactcttgggctgagatttttcaatatgttggataatgtaatgtgctaattataatctctcagggattctatgcagggaacaatttgataggaaaaaatttgaatttgattttcttcactgaagtcattttatttttcattttcaagggctttattgctatattaagatggcagacagtggggacaaatttctaaatgctggtgttgacagaaagcagagatagtttatagagaattttattagttaaaagaaaaaaggcattccttatgttgacacttaaacctgtctcttgatagtatctttgagtcccactcacgtatgtctgatctgcagaagtgacttttttggtgtattacaggtatgcccaaccatatacacatgggagcaggacctccacctcagtttaaccggatggaagaaatggtacagaaggggaaaggggtagatgggggagggagctgcctgttacacagcttgttcattgtttaaaccaagataaggtcttttttttttttcttttctttctttctttttttttgagacagagtctcgctctgttgcccaggctagagtgcagtgacgggatcacggctcactgcaagctctgcctcctgggtcccagttcaagcaattctgcctcagcctcccgagtagctggcattacaggcacgtgccatcatgcccagctaatttttgtatttttagtaaagacagggtttcaccatgttggccaggctggtcctgactcctgacctcatgatccacccaccctggcctcccaaagtattgggattacaggcatgagccaccacgcccggccaagataaagtcagtttttccattgattatgcatgtttcttttaatttggatctcctaaatgtaaggtagaaggtttaggttcaaatcttgatatcttttcattatttttcagctcactttgcaaatatccattaaatacctgccatgtaccaagtgtttttcaacacctaaaggaaggtaggacttgatatgagagccctctagaattcttattgtttaggcctctttctttgtctcagggtgtccagggtggtcgagccaaacgctattcatcccagcggcaaagacctgtgccagagccccccgcccctccagtgcatatcagtatcatggagggacattactatgatccacgtgagttttttcttactgttggggtacttttcttggcagggtgaagtgaagtaagataccaggctcctggctcctgaatttctcttctgacctcttatagtggttatcaaacattgtctggttgctgttttcttcgcatggaatattgagaacatcttttaaagggcttggggaacaaggagacttgtccatgtgaagagtaagggtttatgagagtcccaatgtgatatcttacagtgcagttccagggaccaatctatacccatggtgacagccctgccccgctgcctccacagggcatgcttgtgcagccaggaatgaaccttccccacccaggtaagctttgtgtctctgcttatatgcttccagtacctgaggatatatgttgggagtgccacaaaacccatcctcctgagctttgtgctgctagcctgggagtctggccatcctggctgcttgggcaacaagttcctcttgtgtccatcctgaggacttccattctgagcctgattatactgagcagtccagccgggccatcctgtgaaaatgatgttactttatttttcagtttttttcttctccttatccaggtttacatccccaccagacaccagctcctctgcccaatccaggcctctatcccccaccagtgtccatgtctccaggacagccaccacctcagcagttgcttgctcctacttacttttctgctccaggcgtcatgaactttggtaatcccagttacccttatgctccaggggcactgcctcccccaccaccgcctcatctgtatcctaatacacaggtgagatggctaatgatcatgtttttctagatacacattctttaattcagacaggaatgtggtatggggagaatgctaaaggaatttgagagaacattttcagtgccactgatttgtatgtgacaccaagacgcctcttagtggtcaggagctggaaatgcagcttatgtaatgcccatcatctttattcttttcagtttttttctccgttgcccaggcttggagtgcagtggcgtgatctcggttcactgtaacctccacctcttgggttcaagcgattcttctgcctcagcctcccgagtagctgggattacagtgcctgccaccatgcccggctagtttttgtatttctagtagagatggcgtttcaccatgttggccaagctggtctcaaactcctgacctcaaccgatccacctgcctcggcctccgaaagtgctgggattacaggcataagccaccgcacccagcgttcagtttctttaatggtgtttctttcctgtgttgtggtacatcataggtggcaatacctggtttttactctattgcataaagaagctgtattctactccttatcacccctacctctgtcctgcttaacttccaccacgttgacataatcaagtatctgtagtgtcgctactgaactcagccttttccatttgtcagctgatggtaggaattagagaaagctgggcagtactttgaagaaataaaaaccagagcataataatgaagaattaaggcaaaaatgaatagtcactttattttgaagggtgggcagattagatatttttaaaattataaattccccaattctcttatggctgaataatatttcctgttcatcataggttggatgaattcattcctaactttttcttctcctggcttgtggggtcccaggccccatcacaggtatatggaggagtgacctactataaccccgcccagcagcaggtgcagccaaagccctccccaccccggaggactccccagccagtcaccatcaagccccctccacctgaggtatgagagttccttcctatacttaatgcacatgctccgtcagtgggctttccttctccccagaggatttccctcattttctgggtgtgtttctctggaaaacagtctttttgttatgacctgataacaaattccaactttgttatttcaggttgtaagcaggggttccagttaatacaagtttctgaatattttaaatcttaacatcatataaaagtaagtgcacaacttactgtgaatattgttaaaactaatgctcacacttgcttaataaacaaaaatcacttaattaatgctttttttttttttttttttttttttttttttgagacggcgtctcagtctgttatccaggctggagtgcagtggtgcaatctcggctcactgcaacctccatctcctgagttcaagcgattctcttgcctcagcctcctaagtagctaggattacaggcacgcaccaccacacctggctaatttttgtatttttagtgggaatggggtttcaccatattggccaggctggtcttgaactcctgacctcaggtgatccacctgccttggcctcccaaagtgttgggattacaggtgtgagccaccccacccagcctctgattaatgctttaagttataataatcatgggatatctcaggaggcttaaaggagtcctgaaatttgccagtttgtttgtttggcaagtgtattgggcagggttgaagtagaaacgattgttaacatgacagttttcaattgggaagctacaaggaaaaaatacaggaaggcagtcaaggaaaagggaaatctaaatttgagatgttatagcagaaaaaaccagttctaaagatcatagaggagaaggactgggggttttgttgcttttgtttaaggacattacttaaaacacattatttagaagtgtggctttttgaaaacagcttgtgaatgcccagaaggcccactaacactttggtggttcttccctttttccaacccctgtcagagcagcagaggtgagaactcagaagagaaatacagctggctatctactaccagaagggcttcaaagatatagggtgtggctcctaccagcaaacagctgaaagaggaggacccctgccttcctctgaggacaggctctagagagagggagaaacaagtggacctcgtcccatcttcactcttcacttgagttggctgtgttcgggggagcagagagagccagacagccccaagcttctgagtctagatacagaagcccatgtcttctgctgttcttcacttctgggaaattgaagtgtcttctgttcccaaggaagctccttcctgtttgttttgttttctaagatgttcatttttaaagcctggcttcttatccttaatattattttaattttttctctttgtttctgtttcttgctctctctccctgcctttaaatgaaacaagtctagtcttctggttttctagcccctctggattcccttttgactcttccgtgcatcccagataatggagaatgtatcagccagccttccccaccaagtctaaaaagacctggcctttcacttttagttggcatttgttatcctcttgtatacttgtattcccttaactctaaccctgtggaagcatggctgtctgcacagagggtcccattgtgcagaaaagctcagagtaggtgggtaggagcccttctctttgacttaggtttttaggagtctgagcatccatcaatacctgtactatgatgggcttctgttctctgctgagggccaataccctactgtggggagagatggcacaccagatgcttttgtgagaaagggatggtggagtgagagcctttgcctttaggggtgtgtattcacatagtcctcagggctcagtcttttgaggtaagtggaattagagggccttgcttctcttctttccattcttcttgctacaccccttttccagttgctgtggaccaatgcatctctttaaaggcaaatattatccagcaagcagtctaccctgtcctttgcaattgctcttctccacgtctttcctgctacaagtgttttagatgttactaccttattttccccgaattctatttttgtccttgcagacagaatataaaaactcctgggcttaaggcctaaggaagccagtcaccttctgggcaagggctcctatctttcctccctatccatggcactaaaccacttctctgctgcctctgtggaagagattcctattactgcagtacatacgtctgccaggggtaacctggccactgtccctgtccttctacagaacctgagggcaaagatggtggctgtgtctctccccggtaatgtcactgtttttattccttccatctagcagctggcctaatcactctgagtcacaggtgtgggatggagagtggggagaggcacttaatctgtaacccccaaggaggaaataactaagagattcttctaggggtagctggtggttgtgccttttgtaggctgttccctttgccttaaacctgaagatgtctcctcaagcctgtgggcagcatgcccagattcccagaccttaagacactgtgagagttgtctctgttggtccactgtgtttagttgcaaggatttttccatgtgtggtggtgttttttgttactgttttaaagggtgcccatttgtgatcagcattgtgacttggagataataaaatttagactataaacttggctcccttgccagtgttttgcatgagtcttgatttgggagggagggaagaggactccctaattcccccacagggtcacggtcacaactcaggtcagcccaagttgtgaaacagaagcccagagagatgaggagcccctatgaggccataaatgtgtctgcactccccatcagttatcttttttaaccacatagatcaccaggatgtcatgccatcccttagattggaagtgtcagggacagaaaagtagtgagatgctggttattcacatgagcatctagtatcctttatggcttcctttgtgtttggcaagtaagtttcccaaggtaatatgccatcagatgtcaatataactataccaagtcctgggttggggggaagtacaggtagctagctttcttgaaaagtgaagatgctgctggccaccgtggctcacgcctgtaatcccagcacttagggaggccgaggtgggcagatctcgatcagggagatcgagaccatcctggctaaacagggtgaaacactgcctctactaaaaatacaaaaatagctgggagtggtggcgggtgcctgtagtcccagctacttgggaggctgaggcaggagaatgatgggaacccgggaggtggagcttgcagtgagccgagattgcgccactgcattccagcctgggcgacagagtgagactccgtctcaaaaaaaaaaaaaaaaaaaaggaaaagtaaagatgctgacactaaagtattcaggaccacacagtcttagagagactatcagctcaggtaaggggaagggaatttgtgtgtgtgtgtgtgtgtgtgtgtgtgtgtatttttagtagaaatttttgtattttttgtacaacaaattttgtatttttagtagcaatggggtttcaccatgttggccaggctggtcttgaactcctgaccttaggtgacccacctgccttggcctcccaaggccaagtctgagtctgtgttcttaatgtccttgccagtggctctccaccctaccagatccaaagtcacttttttttttttttctgagacggtcttgcccgtcacccaggctggaatgcagtagcacaatcataggttgctgtaacttggaactccaaggttcaagcaatcttgccacagcttcccaaatagctgtgactacaggcccacaccaccatgcccagctaatttttgtggtttgtttttagtagagacgaggtctcagtgtgttacccaggctagtctggaacgccttggttcaaatgatcctcctgtcttagcctcctagagtgctgggattacatgtgcaagccactacacccagccccaatgttcctttcttataacaaatattttgcaacactaatatcccaaagtgaaatggacagataacataacctgcctggacacatgatttcaaaaaacaaatcaactgtgggtcataattcagtttacctagtccacttggcctttgatgcttagagggcagttcctacctttgaagtgactttttcctctaggtcctgggtgggatggaagtttactacagaagctatctctggtatgggagagcaactttcatatggagctggcagcatttgttgggtttcacaaatccatacacgggaggcatagatatcatagtacatcttttttttttttttttttttttttttggtcttgctctattgcccaggctggagtgcaatggcacaatcgtggctcactgcagctttgaccacctgggctcaatcaatccacccacctcagcctctcaagtagctgaaaccacaagcatgcaccaccacacctagctaatttatttttgtagagatagggtcattgaattcctgggctcaagtgatcccgctgtctgggcttcccaaagtgctgggattacaggcttgagctgctgtgcccaactattgtacatcttataaagacagatgggacttcccccatatcttggtgctggtgccacagccagaggactgtgacttttctgagccccgtccctaattccttttttttttttagactgagtctcactctgtcgcccaggctggagtgcagtggcacgatctcggctcaccacaacctccacctcccgggtttaagcgattctcctgcctcagcctcccaagtagctggggtttacaggcgcccgccaccatgccccactactttttttctgtatttttagtagagatggggtttcaccatgttggccaggctggtctcaaattcctggcctcaggtgattggctcagcttggcctcccaaagttctgggattacaggcgtgagccaccacgctgggcccctaattcctctttaaatcatgtcagtttgcttctcttccccacaatgtgatgggtgactgtaggcctgatctcctggggttatgaaaaaatgccatccagccttgggggtgggttactggcaggaggtttgagtgttggatgcttcccctttacccttgcctcttgcttccctagtccttcagttagaccctattgctctctctgttgccctggtaaccagctctgcaagaagaaactcaagctcagcaaagcccccaggttctctctatcctcccagcctgcctctgggtgggcagaaagaagagggtgtgtaagcagcagacagatagcctgaggtggccctgcccagtccccttgtagaagcccatgggctcaaaaaaagctcaaagctttttcgcccccatctcatagttgttattcataccaccctgccttcctctttatttcttccataagcgggtgcaaatgctctgccagctctcttccccttcagggtcagcgcacagacctgctaccttgtaggcaactcggagcaccaaagacttggaattccaaagtcagctcccagcatctgcagcccacttgggttgactgtccgtctagggcagtgattttcaatcctggccatttgtgtcatgtgaggagctttttaaaaaataccataagccttcgccctggttcagaaatctgatttaattggtctgagatatggcctaggcatcagttttttttttgtttgtttgttttttttttttttgagacagtcttgctcttgttgcccaggctggagtgcagtggcatgatctcggctcactgcagcctccacctcccgggttcaagcgattctcctgcctcagcctcctgagtagctgagattacaggcaccagccaccatgcccagcaaatgtttgtatttttagtagagacagggtttcactatgttggccagactggtctcgaacttctgacctcatgttgcacccttctcggcctcccaaagtaccgggattataggcgtgagctgttgcacttggccagtattttttttttttttttaatatggagtctctcacccaggctggagtgcagtggcatgataacagctcactgcaaccttcacctcccaggttcaagcaatccttctacctcagcctccaaagtagcttggattacaggtgtgtgccaccatgcccggctaattttttttgtatttttagaagtggggtttcaccatgttggtcaggctggtcttgaactcatgacctcaagtgatctgcccgccttggcttcccaaagtgttgagattacaggcgtgagccaccaagcccagccagcatcagtatttctgagaagcttccctgtgattccagtgtgtagtcagggtgaaaaccactgccactccaggaggaccatgacttgatgctggctctcctcactgattcaaaatgttgaacttagtctctgcctgacatccttgagcatttgggggagtactggggtcctgtgtcccaagcttctagcttccagaagtctctcagtctgttttattttcaaccccctacacccttcacactccccaattcgcccttcctaaccaacaattcccaaatcctgcccagagagaaggttaccaaggcaaccggcttaatctggtaactgtggcatgtgctgggagagaagcccttccctcttcctattcagttcataaaatgctacctggggagctccaacccattccagccactttcccctttcaagccaggggatattggagtgtccaataaggggagcacaggaagctgatactcagacctctaatacagcttcttagccaaaattgtgcgctgtcttctttttactgtttccaaatccacaaacagatgggtgtgcaaagctttatttctgtgaacacatgctctagcacacatgggaacagatatgcacatacattgatacgtatgtcatacacaccctgttcagttttactaccactcccagccattagcattcctgtctctgcctggttggtgctcggtaaacaggggtggggcattgtccagagagcctcaacccatcgagaacctgctgccactcccacaccttgtaagtctaacctggatgttctcacacttagcatggctttacgatgcacccccctcctcccccacactccttctggggcagcatatccttaaggacagaatgctcctggtgtgggcatcaggagtaaggattacttggagtgctaattggcaccacttttcccactccatggccatgtacacttgggctctgtgcttgatgatagtcggcagttctggggcttgtcacctgtctccatggccctgcttccttctgctgccagctgggctcaggtgcccttgtgctcctggtctcctccccactgcctattatcccctcctcaccccagctagacctgccacaacctgctgctccctgcctggctcctacctgcctgccagtacctgcccacagaccaggcccacaccacctattgtgccctaccagagaggacagatgggcaccgcctccagtggcaatgctaattcacccaagaggccttcccagctcttctcacagaaggaagataaactccacatatttctgtgagtatgagaaaggtgcacactcttgggttcagcaatctgtaggcctgacttgggtacacaggtaggtgagtgaaggtgtccaggccacagacctgtcctgactctttgaaatgatgctgagacccggttatcccttgagccaggaatccttccccattggtaaatctctgacttacctttgcccttaatttcttctgcttagaacccaagtcccttactgtttccctcgcggtcaaccccagcgcgcgagttcaagcctcgtgcggcgcgggggcgagccgaggaagggtaggggcggggactgggcggggactggaggagggggcgcggtctcggttctgccaccttccccctcttcacggccaggagcgcagccgccgccgccgccgccgccgcgtcctctcagccttgcgctccgcccgctgcctctgccgccgcagcgcagagccgggcgcaccggccccgcagcctgcccactcttcgggccgcgtgccggctgcagccggcatggggggttgctgagagcgagcactcctttcctctggcacctcccccggctactggccactggactctggccagcgaggctcggcccctctggcccccagtctggcgcctggcacggccctctactctgctcctccagctctgagcatcgtgtcttcgccgccccccccgcccgcgcctgggatacctgggtcccccggcgacccctaggagaggggcgggggggggcatgaagccgctggagaaatttctgaagaagcagacgtcgcagctggcgggccgaacggtggcgggaggtcccggcgggggtctggggagctgcggtgggcctggagggggtgggggacccggcgggggcggcggtccagccgggggacagcggtcgttgcagcggcgtcagagcgtgtctcgcctgctgctccccgctttcctccgggagccccccgccgagccggggctggagccgccccctgaggaggaaggaggagagccggcgggggtcgcggaggagccgggcagcggggggccctgctggctgcagctggaggaggtgccggggcccgggcctctcgggggaggggggcccctgcgctccccttcctcctactcatctgacgagctgtccccaggcgagcccttgacttcgccgccctgggcccctctgggcgcccccgagcggcccgagcatcttctgaaccgggttctggagcggcttgctggaggggctaccagggacagcgccgcctcaggtaaggagccggtgggctcgaacacccagagcaggggctggccccggctcctcttccttgcccttggagcgtaggggtggcgccgtgccggggcttggttatagggttgagtggtccgcggaagccggctaggggcctagcggaggtacagaccctcccgcggaagaggagagcagtactcaccttcctccctacagcagcctcaccctcgtctggagaagcagctgagcctcttactctccttcagccacccttcctttcccctgggcattggagccactgactcccatgggtccctgatgttgaatacctcctcctgtggccccaaattagggcctgacacattaaaatgggagctgcccagcgcagccatgccacccgccagaggtgctttagccctgaaaaccctggggtccctgactgttcagaggcctacacagcgcaggctgacccacccagggaggcagtgccagacaggcacaggccccaagctgccttttaggcatcagcaaagggatgcgttgtccttagcagtttggtgggggggatagtattctccttgggctggactcagaaggtgtctgggaggggagaggtggctgggccggcatcatggccctgcagcatccagggtgtccaagcgcctccagcttccacccttcggtggcaggcctcagcacccggcttttttttttttttcttttggagatgtagtctcactgtcacccaggctggagtgcagtggcgccatctcagctcactgcaacctccaccgcccaggttcaagcgattctcctgcctcagcctcctgagtagctgggactacaggcatgtggcaccacgcctggctaatttttgtatttttagtagagacaggggtttcaccgtgttagccaggatggtctcgaactcctgacctcgtgatccacctgccttggcctcccaaagtgctgggattacaggcgtgagccactggcctggctaatttttgtagttttagtagagacggggtttcggggtttcaccaacttggtcaggctggtcttgaactcctgacctcgttatctacctccccccacccccaccccacggcctcccaaagtgctgggattacaggcgtgagccaccggacctggcacacggcctctttaaaatataatcaccacaccctgagaagcttattccctaaatgatgatactatttcaccactccctttcagcacccctactaaggggcctttgaggaaaccaaggccccaaatctggttagttctgaggtagaagaccgagggttctttaggtctagctctaggcattactctaagcccaggagggtctgaggtttgggagccccggctgaggccctaatggtgagggctttcacacttgctctcagccctcggcagggaaccccaacctagatgtgtggaggggggctccactctcctagatccttctcaagacctgggtcctctcctttggagcaggctgtagttgccctggggagctgacaccttttggatttaattagaaaaatatcagacacacacagctctcctaaccataacttcccgcctacaccacacaccctgtgtctctatgacacattccctagggaggctgtacattggcccagagcctgctttggaaaagacagatgcccaactgtggcccccatatcagcatctccccaactctgccccatcttactcttcctttgctccagcttaggaatcctgtgagataaagtctatgaaggatgtcaggcctctcgtttcctcaccctcatccctgaagctgggggtcagagctggaggctctctgactcattgtaagaacacagcagggtagctgggcagggaggaaaagggagaagctgtctttccccttttacaggggcctggtgccacacgctccgctcattctcccctggggtaagactcctgaaatgtcacccatgttatctggcagcctggatccccagagtaactagtttgggaaattccaaaccagtcccaggtgaatgagaatcagcttaacctgccactctgatgttctccaataaaaccaatgttctcaagtcatcctggtctcctcccagggtgtgtgggaggagagaacttacagaagttactctgaacctaccaaagcctctccaacgtccaagcagccccctctgaccgctaggttttaccctaacactctgcttgcctcaggcatattgagaaaaggacaaagactcaggattctgggttcttattccagctccaggcaagtccctcccagctctgggcctcagtttcacatttgcgaaatgaaatccttgaagtcaattactttgtgttggttttcctcctccgcctgcatggctagaactgaccacaggagatagtgaaccaaggggagtcagaagccttggttttgtcctgggacagtgcctggggacctggccctaaccagtcctggtgaggacacctggctccctccctgcaccttgtctgtctgtgtgtgccaggtggccctgccccaccccagggctggctgcaagtcagggcgaccttgtacccggctgactggctgagccaggcccagacgggggtgtggaggggaaaggggtggtgagaggagccgctccccttcaccattccatcattaacccttctgtctctgggcccctaaaggacacaggatttctatttaaaggttctgggatcaaagtgatggcagtctctccatctcccttttaatcaggctggttcccacctgcctagttagaactcaaagctgttaggtgggaaatggggaggggaagagggatacacacacatgcacacacacagtccccactgatgctaacctctgtgtttggaaatactctttgtctggagacacttctgtgggctacttcttttttcaggcagaactcaaccttggtgtgttatctgaccaacttcccacatacgctgaagagaagtgcacatggccatcaaaggcacgcgccccccccttcccttcagctgccttggcagctgccgaacccaccctcgcagtggctgcccagaacctttacacatgtatgtgtgcgcgtgtgcagagcatgacaaggcaggtggctggggctccagcctggctaaagagaacttgcccttaggggcaagagagggaggcactgcatttccagtttcgttctggaagtgcccacctgacatctgtggtgcccactgatctttacagatatcctgctggatgacattgtccttacccattctctcttcctcccgacggagaaatttctgcaggagctacaccagtaatatccttttgtggagtttggaaaaggagaggtcagaagggagccactccctccgtcccacatgcaatctcagagcctaaactctcccctaggaaacatacctggggccgagtgcagtggctcacacctgtaatcccagcactttgggaggctgaggcaggcggatcacctgaggtcaggagatcaagaccagccaggctaacatagtgaaacaccatctctactaaaaatagaaaaaattagccaggcatggtgccacgcacctgtaatctcagctacttgggaggctgaggcaggagaatcacttgaacccgggaggcaaaggttgcagtgagccgagatcgcgtcactacactccagcctgagtgacagagtgagactccatctcaaaaaaaaaagaaaagaaaacatacctgggtttcagtcccagcttttctactcatcagctgtgtgacttgtacagattacctaacctcatggggactcagtttccttttctgtaaaatggaggtaaatagcacctgccctgcctatctattagctgctatgaagatcagtctgatagcagatgtgggagtgctttggaggctgcagagccctgtacaaatgaaaggtgttatttatttatttattttgagatggagtcttgctctgtcacccaggctggagtacagtggtgcgaccttggctcactgcagcctctgcctcctgggttcaagcgattctcctgcctcagcctcccccatagctggggactacaggcgcacaccaccacacctggctactttttgtattttttggtggagacggagtttcaccatgttgcccaggctggtctcgaactcctgacctcaagtgattcgcctgccttggcctcccagagtgctgggattaaaggcgtgagccactgcgcccagccaaggtgttattattctactaagggcacctctatccccactgaattattgctctaaaacatctggttgcccagtgagttatgatggggtctgatgtaaacatcaggccatggttgtgcttcagtagggtccgctagagaggagccactggatgggctattcatagggtctcatgtaagcatgggcctctcacagagttattttaggacctaattgtaaatgtcagaccactgagtagaatgttacaggctcccagccaggcacggtggcatatgactttaatcacagcactttgggaggctggggcgggtggatcacttgagggcaggagttcgagatcagcctggccaacaaggtgaaactccgtctctactaaaacacaaaaaattagccgggtttggtggcaggcacctgtaatctcagctactcaggaacctgaggcaggagaatcgcttgaacccaggaggcagaggttgcagtgagctgagatcatgccattgcactccagcctgggcaacagagtgagactccctctcaaataaataaataaataaataaataaaagtaacaagctgtcttagaaacatcaggccttccagtgaggtatagtcaggtttgtggtaaacaccattggcatttattaggcgcactgtgagctccaggccctgggctggtcagaggttggatgggtctgggcagggtatcctcaagtgaaaatctaacctgtctaacctgcaggagctggatgtggtcaagtggtcatcgctacctactctaagcaaaagcctgggctggggcatgaggaggtcttggcttcaggaccaccgaaactcctttctctctggccccaaatctagagaatacttgggggcaatttagcctcccatctttcttttcttttcttttcttttttttttttttttttgagatggagttttgctcttattgcccaggctggagtgcaatggcctgacctcggctcactgcaacctccgcctcccgggttcaagtgattatcttgcctcagcctcccgagtagctgggattacaggtgtacgccaccactcccagctaattttttgtatttttagtagagatgaggtttcaccatgttgaccaggatggtctcaaattcctgaccttaagtgatccacctgcctcagccttgcaaagggctgggattacaggtgtgagccaccgcgcctggccttttttttttttgccttttttttttttttttttttttttttgagacagagtcattctctgtcgcccaggctggagtgcaatggtgcgactttggctcactgcaacctctgcctcccaggttcaaacgattcttgtgcctcagcctccagagtagctgggattacaggtgcacaccaccatgcccgtctaatttttgtatttttagtagagtcttcgtttcaccatgttggccagactggtctcgaactcctgacctcaggtgatccgcccgcctcagcttcccaaactgctgggattataggcgtgagccactgcgcccagcctagcctcccatctttcttctcaattcctcaggtctgcttgcgtagggatttttcttaacttaagggtcagctttgttcgggcaggaggcatggagggccctgaagggctgggccggaagcaagcctgtctagccatgcttctccatttcttggacacctaccaggggctgcttcaagaggaagagggggccggccacatcatcaaggtgggcctgggggaagagaaggtgggtaaacaggctattagctctggaagggggcccctgtgaaggagccatacttctcattctgggtacctggaaggaagagatgccagggggccttagcttatatggctctcctgtgcttaaaggtatggagaccttgcccggcccctgcagagagtagcccttggaatgagaccccttccttcaccttctttgtcctcctctctccaggatctatacctgctaattatgaaggacgagtccctttaccagggcctccgagaggacactctgaggctgcaccagctggtggagacggtggaactaaagtgagggggagtggggcaggggcgggaacaggaaagtggtcccctgcgttcctctactacaggggctgcctctggcctattggctgcaatatggatttgcttgtttgtttgtttgttttgagacagagtctcactttgtcgcctaggctggagagcagtggtgcgatctcggctcacagcaacctccacctcttgggttgaagtgattctcatgcctcagcctcctgagtagctgggattacaggggtgcaccatgcccagctaatttttgtacttttagtagagatgggtttcaccatgttggccaggctgttcttgaactcctggcctcaagtgatctgcctgcctcagcctcccaaagtgctgggattacaggtgtgagccactgtgtctggcttccaatatggttttatttcagctcctttctctcactgaagggtggcacaaagcactgtctccagtcacttttttgtccattctcccattcatttgtctgataatccagtggtgtactggtaaatatttaacaaccagtgctgcaggagaaagagccctgatttgtagcttttgctgattcctacagtgtaaactctgtcaccatggctgatttcaagctaccaatgtgacaacactgaaagaggagttgggaagagacatgcagcacaggctgttatgtagtatctccaccatacagtagatgtagtaaaaggtagtaaaatggctgggcaaggtggcttatgcctgtaatcccagcactttgggaggtcaagatgggtggagcacttaaggtcaggagttcaagaccagcctggctaacattgtgaaaccctgtctccactacaaaaaaaaaaaaaaaaaaaaaggctgtgtgccaaggcaggcagatcatgaggtcaggagtttgagagcagcccggccaatatggtgaaaccctgtctctactaaaaatacaaaaattagctgggcgtggtagggcgctcctgtagtcccagctacttgggagggtgaggcagaagaattgcttgaatccaggaggtggaggttgcagtgagctgagatcatgccactgcactccagcctgggcgacagagtgagattctgtctcaaaaaaaaaaaaaaaaaaaagaaaagaaaaattagctgggggtggtggtacgtgcctgtagtcccagctactcaggaggctgaggcaggagaattgcttgaacccaggagatggaggttgcagtgagctgaaatcaccttactgcactacagcctgggtgacagagcgagactccgtctctaaagaaaaaaaaaaaggccgggtgcggtggctcacgcctgtaatcccagcactttgggaggctgaggcaggcagatcatgagaggcagatcatgagatcaggagttcgagaccagcctgaccaacatggtgaaaccccatctctactaaaaatacaaaaattagccaggcatggtggcacatgcctgtaatcccagctactcaagaggctgaggcaggagaatgtcttgaatccaggaggcagaggttgtagtgagccaagattgcatcactgcattccagcctgggtgacagagtggactccgtctcaaaaaaaaaaaaaaggccgggcgcggtggctcacgcctgtaatcccagcactttgggaggccgaggcgggtggatcatgaggtcaggagatcgagaccatcctggctaacaaggtgaaaccccgtctctactaaaaatacaaaaaattagccgggcgcggtggcgggcgcctgcagtcccagctactcgggaggctgaggcaggagaatggcgtgaacccgggaagcggagtttgcagtgagccgagattgcgccactgcagtccgcagtccggcctgggcgacagagcgagactccgtctcaaaaaaaaaaaaaaaaaaaaaaaaaaaaaaaaaaagaggtgggctgggtgtggtggctcatgcctgtaatcccagcactttgggaggccgaggcaggcagaatgaggtcaagagatcgagaccatcctggccaacacggtgaaaccctgtctgtactaaaaatacaaaaattagccgggcgtggtggtacacacctgtaatcccagctacacgggaggctgaggcaggagaattgcttgaatccaggaggtggaggttacagtgagccgagattgcagcactgcacgccagcctgacaacagagcaagactctgtctcaaaaaaaaaaaaaaaaaagtagtgaaaacaggaaggaaactgtttttttggtaacaacttatttgattataaattttatgtattatttattaatttgtattattattttttaatagagacggtttcattatgttgtccaggctgggctccagcaatcctcccaccttggcctcccagagtgttgggattctaggtgtaagccaccacacctggcctgactataagtttataaaacatatatatttatatatggagatatatttgtttatttatattttaatggctctttaaaaaacagttggtaaaattccccagaacttaacagtatgctcttgtgagccagtgtgaaccagcttcaggacaccactgtatccatccatccatgaatccattctgcccttttagtttctctcttctcttgtccccaccaccacaacccttagggaggcctcagcttgtggtctagcatccttctctgccttctctgtgctgacactagagagatctttcatgctcctgttccaaaggcatccctgctccccatgcttccaagagaaagtgaaacatcccagcattcaatacccttccctttctgccttctgctgatccttcccatctcatctcctacatcccctccatccatgacacctcaactcctgcgctctcgaacttcccatggtcggttatattgtccaccccagaatgccctcctcccaccatgttttcttttttttttgagacagagcctggctctgtcgcccaggctggagtgcagtggtgtgatctcggctcactgcaagctctacctcccaggttcacaccattctcctgcctcagccttctgagtagctgggactacaggcgcctgccaccacgcccggctaattttttatattttttttagtagagacggggtttcatcgtgttagccaggatggtctagatctcctgacctcgtgatccgcccgccttggcctcccaaagtgctgagattacaggcgtgagccaccgcgcctggccttttttttttttttttttttttgagatggagtcttgctctgttgccaggctggagtgcatggcgtgatctcaactcactgcaacctccccctcccgggttcaagcgattctcctgcctcagcctcccaagtagctgggattacaggtgcacgccactacgcctggctaatttttgtgtttttagtagagacggggtttcaccatgttggccaggctggtcttgaactcctggcctcaagtgatctgcccacctcagcttcccaaagtgctgggattacaggtgtgagccactgcacctggcctccacctccttctcttcctgctttcctccaaggcccaggtcaaatgccatcttctcaatgaaaacttcccagatcttccttttaggaatagctttcttcttcccccacaccagcataactctcctggtacctttgttatattatcaacacctcctgcctggtattagaagtagctgtatgcctgtctatctccttcctagactgtgaagttcttttcagcaaaattcagcaaacagctgctgacctactacctaccatgtgtcaagcagtgtgttaggccctggtggatgaaaagatactcagtaagaaccaaatcccagtcctcaagagctctcaatctcatagaagagataagaggtgaacataaacattatcccaatgttctatagtagttgagagaagaaagtgaccttcctggtgggtggggtggatcagagaagaattcatggaagaggtggcatttgattagggttacttggataattatcccatactgctcattgtcctctcttctgacccccttaaccacctgaaattgctgctggtgcatccttgacccaattctgatattcttgcttgatgttgcctgcttggtgttggttgtccatatgcctggcagggcgtgctgatgcccagctgtgtccatgccaggattccagaggagaaccagccacccagcaagcaggtgaagccactcttccgccacttccgccggatagactcctgtctgcagacccgggtggccttccggggctctgatgagagtgagtgtgggcattaggaggggcagggtgtcctgagtggctcagggggacatatctctgggtcttgagcaccctcagtggcatctccctgggtggtagaaccagcccctttcacaggaccttcttcagaggccagcctctggtggggaatagaggcaccctggaggagactgtgccagctgctgccactctgccctctgttgaaagccattttcctgtttccgtccagtcttctgccgtgtatacatgcctgaccactcttatgtgaccatacgcagccgcctttcagcatctgtgcaggacattctgggctctgtgacggagaaacttcaatattcagaggagcccgcggggcgtgaggattccctcatcctggtagctgtgtcctcctctggaggtgagggtcaggaagaactgggctgatgctccgagaggagaaactcacaagctcagggctctgggggaggggtagagactgaattctaggcccttgctactcaaagtatggtcccgggacaagcctcatgtgcatcgcctgggaacttgttaggatgcagcatcttgctgggtgcagtggtgcaaacctgcagtcccagctactcaggaggctgaggcaggaggattgcttgagcccaggaatccaaggtagtacattatgattgcacctgtgaataggcactgcgccctatcctgggcaacataacaagactctgtctctaaaagagatgcagcatctgcgaccccaccccgacctgctggtcttgttcaaatcagcatttggacaggaccccccaggggactcctatgcctactaaagtttgggaggcactagctgggcatggtggtgtgcacctgtaatcccagctacttgggaggctgaggcaggagaatcacttgaaccgcggaggcggaggttgcagtgccgagatcaagacactgtgctccagtctgggcaacaagagcgaaactccgtctcaaaaaaaaaaaaaaagtttgggaggcactggtctaggactcaggttctgatctgagtgctgcccctcactcacctatggattgtattctgatcctttaacctccctgtgtatgtaaggatgccacatttcacaggctaaagacacaggatgagtgggaaggcagaaagccagcaatgtcactgaagctttgttttcctctacagtaggaaaaaatttcagccttcccagtgtcacaaggacaacagagtaagagaaaagctgtgaaagaaagggagtagaaaaaaagttataaatgcaaaagaaataatcatttgacaaattccagataaatatggcataaactagtgataagatgagttccattagtctagaatgtgtcagtgtggggtgaggagtttttggataggacagtgtcagtgtgggatgtgtgagggtgcaggcggcaggggccgaggatgagcagctctttctcctgcagagaaggtccttctccagcccactgaggactgtgttttcaccgcactgggcatcaacagccacctgtttgcctgtactcgggacagctatgaggctctggtaagaacttcccaaggccttgactggaatggagggctgaggagggctgtgagcaatccctcaccctgccaccaggagcccagcccctatgcccctgcctgccaccaggtgcccctccccgaggagatccaggtctcccctggagacacagagatccaccgagtggagcctgaggacgttgccaaccacctaactgccttccactgggagctgttccgatgtgtgcatgaggtggggaccgaggctggtgctatgctggggggctggagggagaaatgtgccattgggagacggtgttcgcagcacaacgtcctggttccaaggctcacttgcagcaagcccttgggcaacgcatggccgtaacctttgttcccccatctgaaaaaaatcgcaaagagagagaccccagagcacagtggctcagggcccaagtgctgtttacacagaacctgacccaggatttctatttttaaaatattcactattaaagaaataaaataaggcagagacaataatgcctagcagatggttgtcttgaggatgtcagccgtgagcgaatgcctggcacctagtaagtgctcagtagctggtgaaatattattaatgctggttgttttctttttccgcatctttgccgcctcctgtcctttctatttttctattttccaccccttccgcccccgccctcctgcctttcgctcctcatcgccttgcactgccatcttcccacccactcccctcaccccctggcgccctggccgcccctccgctgccgtgggtgcagctggagttcgtggactacgtgttccacggggagcgcggccgccgggagacggccaacttggagctgctgctgcagcgctgcagcgaggtcacgcactgggtggccaccgaagtgctgctctgcgaggccccgggcaagcgcgcgcagctgctcaagaagttcatcaagatcgcggccctgtgagtgcggccgtcggcgggatggggggccggaggccggaggcccgcgccgccgcccgcccctgaccccgcctcccacccccgcagctgcaagcagaaccaggacctgctgtctttctacgccgtggtcatggggctggacaacgccgctgtcagccgccttcgactcacctgggaggtgatgagacccctcccgttcctacctgggaatctgggcatcccgggctccccgaagtgcgtcctcccgggacggccgccggcctggagggagtctttgcgccagttggagggaggcgccctcttctggcatacgcaaccccagggcgcacagcttggctaatggaccctgtctttgtgcaaattagtgaaaagcccggatcccgcctgagtcacggcaggcagcccttggccaggtcaggtcgcagacttggctgtgggagttgggctgattttcatccacactcagtgggggcatctttatacaaagcacctgcataagacagacctggccttccccagaataatgaattcctctgggctgtttcaagcctctagacttagccaaggcctgacttcatttccccacccaccagcttcccagccccctacaagccatgcaggcccttttgccctccaacagggagaattaatccgaggctcccatgtaacccaaggagctccactctgatatcccttctccttccttcaaactctgcagaagctgccagggaaattcaagaacttgtttcgcaaatttgagaacctgacggtgagtgggtttggctctttcttctgctcttggactgagagcccagaaaccctctgttcccataaacccccttcctcaagctttcctttcaaggtgtttagtgtatgggaccccccaccctccttaccatgctggagggtgaggttggaaggattgcgcccctgtttttcttgaaggaaagggggagtagtcaggtccctccccaccacaccattagaaagcccccagcacccctatctgatcaggaatgtatacaaggcagggggtgagggaggaagctgaggacatctttgggatgcattggccagtctgtcccttgatctctctcctgtggaatactaggacccctgcaggaaccacaaaagctaccgagaagtgatctccaaaatgaagccccctgtgattcccttcgtgcctctgatcctcaaaggtgagagagttactcccaagctgtgccgcttccacccatgcttcccttctcctatgccctgcttctgacttccagctccctctcgactcagccctgagtacccacctggagaggagccccccaccacagacggagtgggttctggggaagagcggggtcctcgggtgcagtggcccctttcgaactcctctcttatcctttcctcacattggattctctccacatcccctagacctgactttcctgcacgaagggagtaagacccttgtagatggtttggtgaacatcgagaagctggtgagtgagtggcactgcaaacccctagtcccacaagtggggggcttgcatcctctccctctctcatcacctcccaaaaatagcagccttcctccaagtgcccagcttgcctaacagactcttgactgtctccctggtggcatcactgtggcaacccacccacaggtggcagagctgacaggcagcttgggggcaacttcacctccccctcacatggcactctgttacacccactcctttggtccttcagagaccctccagaattggagactggagggagtaaagcagagtgggagaatggcggagggggagcataagagggggagcctctttctgtgcccctttcaaggctcattccttgtcatctcccagcattcagtggccgaaaaagtgaggacaatccgcaaataccggagccggcccctttgtgagtacccagggtactgagagcagtacagatagagctttgactgaacgggagggttcaggggagaactccctgtccagatgtgtatttccatacacttgctggttccccattctctccttgcctctgcagaggccttcctgcccaacatctgtctcagtccacagcctgatcttctgcccggtgtgtgtgtagaggaagaagggaagctgggaacctgactgcctctccctctttacccactaggcctggacatggaggcatcccccaatcacctgcagaccaaggcctatgtgcgccagtttcaggtcatcgacaaccagaacctcctcttcgagctctcctacaagctggaggcaaacagtcagtgagagtggaggctccagtcagacccgccagatccttgggcacctggcactcaagcactttgcacgatgtctcaaccaacatctgacatctttcccgtggagcaacttcctgctccacgggaaagaggtcgatggatttacccctggacccataagtctgttcatcctgctgaagtcccctccccattgctccttcaagccaaaactacactttgctggttcctgtcccctctgagaaaggggatagaaagctccttcctctatgtcctcccatcgagatctgttctggggatggagcttccaacttcctcttgcagcaggaaagaatgctgctcacccttctgtcttgcagagtgggattgtgggagggattggcagccttcttctccaccacctgtccagcttcttcctggtcagggctgggacccccaggaatattatgttgccgtgtgtgtgtgtgtgtgtgtgtgtgtgtgtgtgtgtgtgtgtgtgtgtgtgtgtgtgtcttcttttagggagcaggagtgcatctggtaattgagggtggatgttgtgtgtgctggggaggggtccttctgtttggtgctacccttgtctactctgcccctggatggtgcggggtgctttctccacccccacactccctgctcagctcctcgtgctgccctgcatgcccaggcttgtgagccaagctgctttttggggcagggagtagcagcaggtgggaggggttacccatcagcccttgcaagtcccccactcaggcctctggaaggtccagggatgggctctgatgagagggtaaaagatgctcagggaaacacaggcctcagctgcctagaggaccctccccctgccttgcagtgggctcgggtagagcagtatcaggagctagggttgtctgctgcccacactcctgctttttgggatatctaactgctaaggagggagttgacatcccccttctggctcatgtgtctgacaccaacaacatggtctctgtccctctctctttgactctccctttgtcctccccatagagctggggtggggtggatccctatacctggggcaggcagccccaaagtgggggagggggatggcagagactgtaaaggcgccactggactctggcaaggcctttattacctttactcccctccctctcccatcaccagcctcaaggcctgaggggtgcaggggctcctggcagctactgggtgaggtttcctggcacagactcacccttctttctggcaccacctctttcccttttgaagagacagcaacagccgtagcaaaagcagctgctgctcctgctatgagggtgtatatattttttacccaaagctctggaattgtacatttattttttaaaactcaaagagggaaagagccttgtatcatatgtgaacattgtatcataggtaatgttgtacagacccttttatacagtgatctgtcttgttcctgcagcaaaaatcctctatggacataggaggtgctgtgtcccatgccctcttgccctgacagtgtcccatgggcccccttctgctccctgccccctccctgctactgctgatgcactctcctctccctgcagcccctggcttcccagccttcctcctgaccccttccaacagccttggaactccagctgccaccaccctctgggtcggacactgggacccactggcccagtcttggctgctgcttacccctagccttgatgcctgcccagggacccccagccccctcccgttgccctgcagctttaacagagtgaaccatgtgtattgtacaggcgcggttgtcattgcagaaaccgctgggtggagaagaagccgataaagtctatgaatcaacctgcctgttgttctccattctgttttctttgaggctgtggaagtgctgagggaggggagaggggatggccgcccagtgctgtcaggagcagggctgttctggagtgactttgaaaatgtgggtggcggggtacagtggctcatgcttgtaatcccagcactttgggaggccgaggcgggcagatcacctgagggcgggagttcgagaccagcctggccaacatggtgaaaccctgtctctactaaaaatacaaaaattagccaggtgtggtggtgcatgcctgtaatcccagctacttgggaggctgagtcaggagagtagcttgaactcaggaggcggaggttgcaaggcgcagtggctctccagcctgggcaacagagcaagactctgccaaaaaagaaaatgtggatgagaggaaaagatgccaacctcacaagacatgtcacataatgcctggaactcagaagaggggatgggatgttttcgttcatacatgttccaggtggcataaatatgagatcacatttaattctaatgctaaggtagaagattgaggcacagcagtcccagaataattactagtgagggcactggtcccctaacccaggtctgtcccctgaagacagcatgtactgttcacacaaccaatatttaccagttctactaagttttgttttgttttgttttttttgagacggagtcttgctctgttgcccaggctggagtgcagtggcgtgatgtctgctcactgcaagctctgcctcccaggttcatgccattctcctgcctcagcctcccaagtagctgggactacaggtgcccaccaccatgccgggctaattttttttttaatatttttagtagagatgaggtttcactgtgttagccaggatggtctggatctcctgacctcgtgatctgcccacctcggcctcccaaagtgctgggattacaggcttgagccactgcgcctggcccaatcctactaagattatagggtgcagagagcctagcgttaggcttaaatgatagcctgagttccaggagacatcatacactcaaatagctatacctgggcccttgataatccccattcacatctgtttctgcctcagtcttctgcatctcagaaaaatgatcctctcatccacccaggttttctctctctgttgcccaagctggagtgcagtggcgtaatcttggctcactgcaacctctgcctcccaggttcaagtgatcctcctgcctcagcctcctgagtagctgggattataggcagaggccaccacacccggctaatttttgtatttttagtagagatggggtttcaccatgttggtcaggttggtctcaaactcctgacctcaagtgatccacccacctcagtcttccaaagtgctgggattacagctgtgagccactgcccagccacctacccaagttttcaaggcaaaaatacaggactcaccattggtgcctctttctcccacccttcattcatctcagccagtcccatcggctacaattccagagcattttctgagtgatccacttctgtatgactcccctatgaccatactagtccaaaccaccttcatagcttccctgcatgactactgcagcctcctacctggtctgtcagcttcctctctttgatccacccctacctgccaccagtttgatttccacatggcagccagggtgttctttcagaaacaccaatcacgctgggcatggtggctcaagcccataatcctagcacttcgggaggctgaggcaggaggatcgcttgagcccaggagttcaagaccagcttgggcaacatagtgagaccctgtctctacaaaaaataaaaaattaacgaggctgcagtgagctgcgatagcaccactgtactatagcctgagcaacagagtgagaccctgtttaaaaaaaaaaaaaaaaagaaaggagagcaagggaaggagggagggagggacagagggagggagagagggagggaggaaggaaagaaggaaggaaggaaggaaggaaaaaaacccagtgtctttcaacacatgaatggacaaatgcattggggcatattcttatggtggaatactatatagcaagaaaaaagaacaaattattaatacccacgtgaatgaatctcacagacttaatgttgaataaaggaagccagacacaggctgggtatgttggctcacacctctaatcccagcactttgggggcctgaagtaggagtgagaggtgaagctggctgggcttctgggtcaggtggggacttggagaagttttctgtctagctaaaggattgtaaatgcaccaatcagtgctctgtgtctagctaatcaggtaggggacttggagaacttttctgtctagctaaaggattgtaaaagcaccaatcagcgctgtgtgtctagctaaaggtttgtaaatgcaccaatcagtgctctgtgtctagctaaaggtttgtaaatgcagcaatcagtgctctgtgtctagctaaaggtttgtaaatgcaccaatcagcactctgtaaaaacgaaccaatcagcactctgtaaaacggactaatcagcattctgtaaaatggaccaatcagcgctctgtaaaatggaccaatcagcaggatgtgggtggggccaggccacccgagccagtagcggcaacccactggggtccccttccacgctgtgggagctttgttcttttgctctttgcaataaatcttgctgctgctcactcttttggtccgcactatatgagctgtagcacttaccacaaaggtctgcagcttcactcttgaagccagcgagactacgaacccactgggaggaacaaacaactccagaagcgccacctttaagagctgtaacactcactgctgaaggtctgtggcttcattcctgaagtcagggagaggacgaacccaccagaaggaagaaactggacacatctgaacacctgaaggaacaaactccggacacaccatctttaagagctaacactcaccgtgagggtctgtggcatcattcttgaagcttcattcttgaagtcagcaagactaagaacccactggaaggaaccagttctggacacaggaggatctcttaagcccaggagttcaagaccagcctggccaacatagtgagacccctatctctacaaaaaataaaaaatgtagctgggcatggtgtgtcgcgcctgtaatcccagcactttgggaggttgaggcaggagaatcccttgagtccaggagtttgagaccagctcaggcaacatagggagaccttgtctctacaaaaaaataaaaaaataggccaggtgcggtggctcatgcctgtaatcccagcatttgggaggccgaggtgggtggatcacctgaggtcggaagtttgagaccagctgaccagcatggagaaactgtctccactaaaaatacaaaattagctgggcgtggtggcacatgcctgtaatcccagctactcgggaggctgaggcaggagaatcgcttgaacctgggaggcagaggttgtggtgagctgagagcgtgccattgcactccagcctgggtaacaagagcaaaactccatctcaaaaaaaaaaaaaaggctgggcagggtggctcacgcctgtaatcccaacactttgggaggctgagacctatggatcacgaggtcaggagtgcaagaccagcctggccaagatggtgaaacaccatgtctactaaaaaatacaaaagtgagctgggcatggtggcaggcacctatgtaatcccagctactcagaaggctgaggcagataattgcttgaacccgggaggcagaggttgcagtgagccgagatcgtgctactgcactccagcctgggcgacagagtgagactccgtctcaaaaaaaaaaaaaaaaaaagccatatatggtggtgcattcctgtagtctcagctacttggtaagctggggtgggaggattgcttgagcctgggagctcaaggctgcagtgagcagagatcatgccactgtattccagcatgggcgaaagagggagaccgtgtctcaaaaaaagaaaaaaaaaaagccaagcatagtggtgcatgtgtgtagtcccagctactcaggaggctgaggtggaaggattgtttaagcccaggagttcaaggctgcagagagctatgattgcaccactgtactccagcctgggtgacagagtgagactctttctcttaaaaaaaaaaaagaaaaagaaaaaaaggccgggcacggtggctcacgcctgtaatcccagcactttgggaggccgaggcgggtggatcacgaggttaggagagtgagaccatcttggccaacatggtgaaatcctgtttctactaaaatacaaaaaaattagctgggtgtggtggcgtgcgcctgtaatcccagctacttgggaggctgaggcaggggaatcgcttgaacccgggagggagagtttggagtgagctgagattgcgccactgcactccagcccggcgacagcgacagaacaagactcagtctaaagaaaaaaaaggctgggcgcggtggctcacgcctgtaatcccagcactttgggaggcggaggcgggcggatcacgaggtcaggagatcgagaccatcctggctaccagggtgaaaccccgtctctactaaaaatacaaaaaagtagcccggcgtggtggtgggcgcctgtagtcccagctactccggaggctgaggcaggagaatggcgtgaaaccgggagggggaccttgcagtgagccgagatggtgccactgcactccagcctggacgacagagcgagactccatctcaaaaaaaaaaaaaaatttaggccgggcacggtggctcacacctgtaatcccagcactttgggaggccaacgcgagtggatcacctgagattgggagttcaaggccagcctgaccaagacggagaaaccctgtctctactaaaaacacaaaattaactgggtatggtggcgcatgcctgtaatcccagctactagggaggctgaggcaggagaatcgcttgaacctgggaggcggaggttgtggtgagctgggatggcaccactgcactccagcctgggcaacagagccagactccatctcaaaaaaaaaaaaaaaaagttcaagagcaggctaaattaatctacggggatagaagtaaaaataggctgggcacggtggctcatgcctgtaatcccagcactttgggaggctgaggcgggcgaatcacgaggacaggaaatcgagaccatcctggctaacacggtgaaaccccgtctctactaaaaacacaaaaaaaattagccgggtctggtggcgggcgcctgtagtcccagcaactcgggaggctgaagcaggagaatgacgtgaacccgggaggtggagcttgcagtgagccgagatcatgccactgcactccagcctgggcgacagaacaagactccgtctcaaaaaaaaaaaaaaaaaaagaagtaaaaatagtgcctactcaatagggtaggggaaagtattgaccgtgaaggggcatgaagaagccctgtggggcgatagaaatgttccatatcggccaggcgcggtggctctcgcctgtaatcccagaactctgggaggtcgaggtgcgggaggctgaggcaggagaatcacttgaacccgggaggtggaggttgcagtgagctgaggttgcactgagctgagatcgggccactgcactccagcctgggcaacagagtgaggaataaataaataaataaataaaagaaatgttccatatcgtgacctgggggtgggtatacaagtgtgtctatctggcttgttgagttggtcatgtaaaatttgttaagtgttaccgtagctacattacaccataaagcaattcagattctgacagtccactgtttttaataacagatttaaaataaaaaattctcccttcctggccaggcatggtggctcacacctataatcccaggactttgggaggctgaggcaggcagatcacttgaggtcaggagttcaagaccagcctagccaacatggtgaaagcctgcctctactaaaaatacaaaaattagttgggtgtggtggcggtcacctgtagtcccagatactcgggaggctgaggcaggagaatcagttgaacccaggaggcggaggttgcagtgagccgagatcccaacactgcactccagcctgggtgacagagcgagactctgtctcaaaaaataaataaataaggtgtcttcatgaggtgtgctgcgtgcagtgaagaatttaggcagtgccctttgaatccactaggtgtcaccaccaagattgttttctcaacctgcctggggatgagggaggaggctacataacccagaggaggatagtgcctttcttggggtaatcttgaatccttctgagagggtctatccccagatataagtcatatttgaccggaagaacttgtttcttcagtctctccctatgagctctttcatctttagcgtttaaacccttttaagtctccatttttaaaaacactttccttctgtagtcctagtgggaggatcgcttaagcctagaagtttgaggctgcagtgagctatgatcacaccactgcacgccagcctgggaaacagaccaagaacatgtctcaaaaataaataggccgtgtgcagtggctcacgcctgtaatcccagcactttgggaggctgaggcaggaggattgcttgagctcaggagtttgagaccagcctgggcaacatagtgagacccttacctctactaaaaaaaaaaaaaaaaaagccaggtgtagtggcatatgcctgtaatcccagctactcggaaggctgaggcatgagaattgcttgaacccaggaggtggaggttgcagtgtgtggagattgagccattgcactccagcctaggtgacaaagtgagactgtctaaaaaaaaaaaaaaagaatcctaatatttggggaaaaaaagaaaaaacattatgtttaaatgtgttgtgtaatatttcaatcatacaaaaagtttaaagactaatataatgagcacttgagtctccacctcccagcttaggaaatgaaaacttggccgggtgccgtggctcacttctgtaatcccagcactttgggaggccgaggtgggcagatcatgaggtcaggagatcgagaccatcctggctaatacagtgaaaccccgtctctactaaaaacacaaaaaaattagccaggtgtgtagtcccagctactcgggaggctgaggcaggagaatcacttgaacctgggaggcggaggttgcagcgagctaagctcgtgctactgtactccagcctgggcaacagagagagactccgtctgaaaaaaaaaaaaagaaaagaaaaaaagaaaaagaaatgaaaccctaccctccagctgaacctggtacctgtccccagttgcatcctctttctttctttccagagacaaccaccctcataagtatggtattgtgacacaaagtagcaaacctaagtagccacttttgttaattctgcttgccagcagaatttcaccaattcccttggcagcagaatttcacaaagcccctgagtcagtgtgagcacagtccccagcccagaagaatgccctgaaaatgataagcaggatagggcacagcttcctgtgtctcttgccaaagtcactgcaatttccgaaaagataagttcagtgatcctggcctttgcttcttcctgtacgtaaaacaatgtgacgaattaatgattatgcctctgtaatctataaccagatgtatcttcgcacccatactttgatgagattttgctctaatgtaacttctcagcatatatttaatataacttctgagcacatacagaaccgccaccacctgtgtattcactactccggagcagtctaactgaatctctctgaaagtctcctcccaggttgggcgcaatggctcatgcctgtaatcccaacactttgaaggctgaagcaggtggatcacctgagatcaggagtttgagaccagcctggccaacatggtgaaacgtcatctctattaaaaatacaaaaaaaaaaaaaatggccgggcgtggtggctcacgcctgtaatcccagcactttgggaggcctgaggcgggcggatcacaaggtcaagagattgagaccatcttggccaacatggtgaaactccatctctactaaaaatagaaaaattagcagggcgtggtggcgcatgcctgtaatcccagctactcgggaggctgaggcaggagaatcacttgaagcagggagtcggaggttgcagtgagctgagatcgtgccactgcactccagcctggcagcagaacgagactccgtctcaaaaagaaaaaaaaaatagctgggcgtggtgatgggagcctgtaatcccagctacttgggaggctgaggcaggagaatcgctttaacctgggaggcggaggttgcagtgagccaaggtcatgccattgcactccagcctgggcaacaagagcgagactctgtctcaaaaaaaaaagaaagaaagaaagaaagtctcctcccagattgcaatcctcagtgaaactctgcataaaacttattctttaaatgcttggtttttctctctctctctctctctgtctctttccttcttcttcttctttttttttttttggggggggttcaggatgttactctgtcacccaggctagagtgcagtggtgcaatcacagctcactgcaaccttgacctcctggactcaagtgatcctcccacctcagcctcacgagtagctgggaccacaggcatgcaccaccatactcggctagtttttttattgtttgtagagacagaattttgctacgttgcccaggctggtctcaaactcctgggctcaagggatcttcccatctcagagtctcaaagtgctggggttacaggtgtgagccactgttcccagccaaaagcttgatttttctttcatcaacagtataacattcctgtaaacttgtactacatttgtatacatctccaaacagtgtgttgcaattttgaggataacagttttattgagatgtagttcacatactatgtaattaacctaaaatgtacaaatcaatggtttttagtatattcaccaagctgtgtaaccatcaccacagttaattttgttttttttgttttttccgagacagagcctcgctctgttgctcaggctggagtgaaatggcacggtctcggctcactgcaacctccacctcccaggttcaagcaattctcctgcctcagcctcccgagtagctgggattacaggcggccgccaccatgcctggctaatttttgtatttttagtagagatgggggtttcaccatgttggccaggctggtctcgaactgctgacctcgtgatccacctgccttggcctcccaaagtgctgggattacaggcgtgagccaccgcacctggctaattttagatcattttcattaccccccaaaagaaaccccctgtacaagactgttcatagcaacattatttgtagtagcccaaagtagataaactaaaatgtggtatattcataagatggaatactattccatcataaaaaagaatgtatttgtccattctcacactcctataaagaactacctgaggccaggtgcggtggctcacacctgtaatcccagcactttgggaggccgaggcaggtggatcacctgaggtcaggagttcaagaccagcctgaccaacatggtgaaaccccgtctctactaaaaatacaaaaaaattagctgggcgtggtggcaggtgcctctaatcccagctacttgggaggctgagggaggagaatcgtttcaacccaggaggcagaggttgcagtgagccagattgtgacactgcacaccagcctgggcaacaagagcaaaactccatcacacacatacacacacacacaaaaactacctgagactgggtaatttataaagaaaagaggtttagtggctgggtgcggtggctcacgcctgtaatcccaacactttgggaggccaaggtgggcagatcacgaggtcaggagattgagaccatcctggctaacatggtgaaaccccgtctctactaaaaatacaaaaaaattagctgggcatggtggtgggcgcctgtagtactagctactcgggaggctgaggcaggagaatggtatgaacccgggaggtggagcttgcagtgagccaagattgcgccactgcactccagcttgggcaacagagccaggctccgtctcaaaaaaaaaaaaaaaaaaaaaagaaagaaagaaagaaagaaaagaggtttaggccaggcacggtggttcattcctgtaatcgctacactttgggatgccaaggctagcagatcacgaggtcaggcaatcaagaccatcctggccaacatgatgaaacccagtctctactaaaaatacaaaaaattagctgggtgtggtggcacgcacctgtagtcccacctactcaggaggctgaggcaggagaatcacttgaacccaggaggcgagggttgcagtgagccgagatcatgccattgcactgcagcctggacaacagagcgagactccatctaaaaaaaaataagaggtttaattgactcacagttccacaggacgtacatgaggcacggctggggaggcctcaggaaacttacaattatggcagaaagggaaaggggaagcaagtaatcttcacatgagcaggaaagagagagcagaaggggaggtgacacacacttttatttatttatttatttatttattttgagactcactctgtcgcccaggctggagtacagtgacatgatctcagctcactgcaatctctgccttccgggttcaagcgattctcctgcctcagcctcctgagtagctgggattacaggcatgcatcaccatgcctggctaatttttgtatttttggtagagaaaagatttcaccatgttggccaggttggtcttgaacccctgacctcaggtgatccacccgcgttggcctcccaaatgctgggattacaggcgtgagccatgtgcctggccagtgccacacacttttaaacaaccagatctcatgagaactcattcattatcacggaatcagcaagggggaaatctgctcccatgatccagtcacctcctgccaggtccctcctaacattggaaattacaatttgacatgagatttgggtggggacacaaagtcaaaccatagcaaggaatgaagtactgatatatactacaacatggatgaaccttgaaaaaactgtgctaaaaaaccagacacaaaaggcctcatattgtatgattccatttatatgaaatgtccagcatagacaaatccatagagacagaaagtagatagtttctggttgccatgggctggggtgagagcagaatggggagaggctactaatgggtatggagtttctttttgggtgatgaaaatgttttggaattagatagtggtgatggctgtacaacattgtaaatatactatatactcacttggatgctttaaagtggttacaatggtgagttttatgttatgtgaattttatttgcttggcttctagactcatcacaccagtctctgcctccatcattacaaggcattctcctctgtgtgtctctctgtgtcctctcttcttctttctttcttttttttttgagatggagtctcactcttgtcacccaggctggagtgcagtggcatgatcttggctcactgccacctccgcttcccaggttcaagtgattatactgcctcagcctcctgaatagctgggattacagaggcccgccacgacgcccggctaattttttgtatttttagtagagatggggtttcactgtggtctcgatctcctgacctcgtgatccgcccgcctcggcctcccaaactgctgggactacaggcgtgagccactgcgcccagcctctcttttcttttctttcttttttttttttttttgagacagagtcttcctgtgtcacccaggctggagtgcggtgtcacgatctcagctcactgcagcctctgcctctgcatcctggactcaagtgatcctcccacctcaacttactgagtagctgggaccacaggcgcgcaccaccaagcacagctaatttttctggatttttagtagagacggggtttttatcgtgttgcccaggctcgtctcaaactcttggcctcaagctatctgcctgcctcggtcggccacacaaagtgctggaattacaggtgtgagccaccacgcttggccaattgaatgtttttagattttatataaatattatcatactggatgtggtgttcagcaactccccatccacaacactctgcctgtgaggctcatccaggtcagcatatattactggtttgtttggttttgctgttctgtgtttctctttgattctcaacccagtgcatctggctttctctgtcatcactcacataatctgcctgggtcaagagcaccgatgactcccatgttaccaaatccaagaacacttattttcctattgctggcatttgatatttctgaccattcttccttctggaacacttatcgctgcttccaggatgctacgttctcaggatttccctgtcttctctttctcagtcttcctcactggcctctccctcagcctggtccttgtatgtggagtgccccagctccctcttgagccctttttttttccttccataatcctgggcttagatttcatcgtcatatttgtgtttgggaatctactgctgcataacaaacagttccaaatttagtagcttaaaaatgacaactttgttttattttattttactttttatttttttttgagacagagtcttgctctgtcgcccaggctggagtgcggtggcatgatcttggctcactgcaacctccgcctcctgggttcaagtgattcttgtgcctcagtctcccaaatagttgggattacaggcatgagccaccacgcccagctaatttttgtatttttagtagagacagggtttcactatgttgcccaggctggttttgaactcctgacctcaggtgatctacctgcctcagcgtcccaaagtgctaggattacaggtgtgagccactgcacccagcctaaaaacagcaaccattttataacttctcatgatcttccgggctgatgggagcttagctggatagttcttctggtctcacttgaggtctctcttgctgcagtcagaaggccactggagggccaggtgcagtggcttacgcctgtaatcccagcactttgggaggccgaggcgggcggatcacctgaggtcaggagtttgagaccagcctggccagtgtggcaaaaccccatctctactaagcatacaaaaattagtcgggcatggtggctggtgcctgtaatcccagcttctcaggaggctgaggcagaagaatcgcttgaactcgggaggcggagatggcagtgggccgagatcgtgccactgcactccagcctgacaaagcgagactcagtctcaaaaaaaaaaaaaaaaaaaaaaaaaaaagccactggagctagctaggatgctagctcacatgtcctgagccctggtgggaacaaagggaccacaaggatggctggacttttctctccatgtccaggcttctccctccaggtggtctctgcagcagagtacctgatttctcacatgggagatgactcccaaaagcaaaaaagtagaagctgtcaagtctttttacaatttagtcctgaacctggtacagcttcaattctgctgcattccactggttaagagcagtcacaggccagccccacattcaataaataccaggactcctggttcactgggagccatctttggaaattagctaccacagtttatgagtcccaaattcctaggattactctcctcagtttcagacccaaatatccagtgatctaaggaatctctcttcttggtcattccactgtgctattcgggctcctccagtgccccagcccctcctcttgctctgcaactgtttccagctaagtgttaacatcacctccaagcaggagttcaagtcagaaatttagcaatcatatttgggtcctcccactctttggtcccgcattccttttcttaaatatctctagacttacccctctccatctctgctgctgatactctaatcacaaacatggctaagattggtgagtggtttccatgtgtgtaaacacttgggatgcattccatttgggcttatctgctcattttgcagatgaggaacctgagactggtagaggttggataatttgcccaaagtctcaccttattcaagagtggggagaactaagaggccttaggttctgcagacagacaggcagccctgacttcagaggctttgtgccaagccagtgtccagcagccactcagtgtagacaactgtcatctcccagttggcctttcctagcagtctcccaactggtgttccggcctccaacctggccccatctaatccatcctccttgctgcagtcagaggtatctttctagaataccaagagcatcttggtcttctctgcttaagcctttcaatggtttcccttgagataaaatctaacttttctcaatacataattaagtccttcataaattggcccctgtcagcttgacagtatagcgtgaggcagtagctcttcatgggagcattttggaaatgtcgttgtccatctatcacaatggtaagaacgtgctattggcatttgatggtcagtggtcagggatactggagtgctataatacaagggacacccaaccaagaattatccttggtttccacaaaactctttttttttttttccagagtcttgctctgtcaccccagcttgagtgcagtgacacaattttggctcactgcaagctctgcctcacaggttcaagctattctcctgcctcggcctcccaagtagctggacttataggtgctcgccaccacgtctggctaattttttttttttaatatatatatagtttctgagacagaggctcgctcttgttgtccaggctggagtgcagtggcacaatcttggctcaccccaacctctgcctcctgggttcaagccattcttatgcctcagcctccagagtagctgtgattacaggcacctgccatcatgcccggttaatttttgtatttttagtagagatggggttttaccacattggccaggctggtctggaactcctggtcacgagtgagccacccacctcagcctcccaaagtgctgggattacaggcgtgagtgggtcccatctttacggtgggggaatctcctattaaattcccctttgaagactgagcacggtggctcatgcctgtaatcccaacactttgggaggctgaggcgggaagatcatgaagtgaagagattgagacaatcctggccaacatggtgaaaccccgtctctactaaaaatacaaaaaattagctgggcgtgctggcacgcgcctgtagtcccagcaacttgggaggctgaggcaggagaattgcttgaacccaggaggcagagcttgcagtgagccgagactgcacctctgtactccagcctggtgatagagcaagactccatctcaaaaaaaaaaaaaaaattcccctctggagaggttttggggtgtttccccttcccatgagacaataacaaaagttcaagttcaccaggttagtcaagtgccctcagagtaaaagcttgtttcagtgttccactgacctctctctgcatcccctgccttattttattttgccctgaaaattccttactttttcagcagctcatcaaagcatttaaaatttaaaaaaatttaggctgggtgtggtggctcatgcctgtaatcccagctactcgggaggctgaggcaggagaatcgcttgaacccaggaggcagaggttgtggtgagccaagatcacgccattacattccagcttgggcaacacaatgagactccatttcaaaaaaaaaaaaaaattaggccaggcgcggtggctcatgcttgtaatcccagcactttgggaggccaaggtggcagatcatgaagtcaggagattgagaccatcctagctaacatggtgaaaccctatctctactaaaaatacaaaaaattagccaggcgtggtggcgcatacctgtaatcccagctactcgggaggctaaggcaagagaatcgcttgaacccaggaggcggaggttgcagtgagctgagattctgccactgcactctagcctgggcgagagcgtgaaattccgtctaaaaaaaaatttaaaaaaataataatttttatctgagatttttagttgttttttggggagacagagtcttccaggtacttggcctggcagacaaaggaaggcataaacatgaaatatttttgcacgtatttaatatgacctgtttttttccaagaatgcaactactatgtaaattgttttgtattgttcagaactttatcaaaagttgtttaccattttggaaaatcacaaccctaatggcaatgctgttctatacaacacccttaggtcagtctgcatttatctctaccacactcttagtgattctaggtatgggtgcaagtatctgactactttatcttctagtgtaatggtgcctgggtatttgcatattgaaacgccatccttctatttgtcttttttttttttttgagacggagtttcactctcattgcccaggctggagtgcaatggcatgctcttagctcactgcaacctctgcttcccgggttcaagcaattctcctgcctcagcctcctgagtagctgcgattaaaggtgcccaccatcatgcctggctaattctttatatttttagtagagatgagatttccccatgttggccaggctggtcttgaactcctaacctcaggtaatccacccgccttggcctaccaaagtgctgggattgcaagtgtgagccaccgtgcccggcctatttgtcttttttataatcaagacatcatattgatttgttttttgaaatcatgtgtccaggcaggttatattatctgttcatttcactttgggatattagtgttgcaaaatatttgttataagaaaggaacattgggactgggtgtagtggcttacacatgtaatcccagcactctaggaggctaaggcaggaggatcactggaacctaggcgttccagatcagcctgggtaacacagtgagaccttgtctctactaaaaacaaaaaaaaaattagctgggcatggtggtgtgggcctgtagtcacagctatttggaaagctgtggcaggattgcttgaaccttggagttccaagttacagccacctatgattgtgctactgcattccagcctgggtgacggagcaagaccctgtgacattggatatggtagggtggaaagtcaccagccaggacattaagaacgcagactcagccaggcatggtgactcatgcctgtaatcccagccctttgggaggctgaggcaggcagatcacgaggtcaggagttcgagaccagcctggctaacagtgaaaccctgtctctaagaaaaatgcaaaaattagccaggtgtggtggcatgcgcctgtagtcccagctactcgggaggctgaggcaggagaatcgcttgaacctgggaggtgaaggttgaagtgagccgaggtcgcaccattgcactcaagcctgggtgacagaatgagactccatctaaaaaaaaaacacacaaaggccgggcgcggtggctcatgcctgtaatcccagcactttgggaggccgaggtgggtggatcatgaggtcaggagatcgagaccatcctggctaacacagtgaaaccctgtctctactaaaaatacaaaaaattagccgggcgtggtggtgggtgcctgttgtcccagctactcaggaggctgaggcaggagaatggcgtgaacccgggaggtggagcttgcagtgagccgagatcgtgccactgcactccagcctgggcgacagagtgagactccgtctcaaaaaaacaaaaaacaaaaaacaaaaaaaaaccacacacacaggctcagcggggtgcggtggctcacgcctgtaatcccagcactttgggagtccgaggagggtggatcacaaggtcaggagttccagaccagcctggccaacatagtgaaaccccttctctactaaaaaatacaaaaattagccaggtgtggtggagcacgcctgtaattccaggtactcaggaggctgatgcaggagaattgcttgaacccaggaggtggagtttgcagtgagctgaaatcatgccactgctctccagcctgggcgacagggcaagatgtgtctcgaaaaaaaaaaaaggggttgggcgcagtagcacattcctctaattccagcactttgggaggccaaggctggcggatcacctgaggtcaggagttcaagaccagcctgaccaacatggataaaccccgtctctactaaaaatacaaaattagctgggcatggtggcacatgcctgtaatcccagctactagggaggctgaggcagcagaatagtttgaacccaggaggtggaggttgcggtgagccgagatctcgccattgcactctagcctgggcaacaagagtgaaactctgtctcaaaaaaaaaaaaaaaaaatgccgggcgcagtggctcacgcctgtaatcccagcactttgggaggccgaggcgggcggatcacgaggtcaggagattgagaccatcctggctaacatggtgaaaccccgtctctaccaaaaatacaaaaaaaaaaaattagccaggtgtggtggtgggctcctgtagtcccagctactcaggaggctgaggcaggagaatggtgtgagcctgggaggtggaacttgcagtgagccgagatctcgccactgcactccagcctgggcgagagagcgagactccatctcaaaacaaacaaacaaacaaacaaaaaaacaaagggccaggtgtggtggcttacacctgtaatcccagcactttgggaggccaaggcaggtggatcacttgaggtcaggaattcaagaccagcctggcaaatatgatgaaacctcatttctactaaaaatacaaaaactagccgggcgtgctggcatgtgcctgcaatcccagctactcgggaggctgaagcagaagaattgcttgaacccgggaggcagaggttgcagtgagccgagatcgcgccattgcacttcagcctgggcaacacagcaagactgtctgaaacaaacaaacaaaaaacacagactctggagatacttttactttcgctacttatagatatgtgactttgagcaagatgattaaccttgctgtgtctgtttcttcatctgtaaaatgggcttaaaaatatctgcctcagaaagttattgagaggattaaatgagctatgtgaggttttgacagtgcctggcacatggtaagtgttactaaatgtcaaacttatgatgacttctgtaacctaatttcttgcctcccccagaagttctaactctatatcaatatattttctgaaccaggtgaggtggctcacacctgtaatcccagcactttgggaggccgaagtaggaggatcacttgaggccaggagttccacaccacctgggcaacaaagggagatgctgtgtctgtgaaaagaaaaaaattggccgggcaccgtggctcacgcctgtaattctagcactttgggaggcctaggcaggtggatcacgaggtcaggagatcgagaccatcctggctaacacggtgaaacctcatctctactgaaaatacaaaaaattagctgggcgtggtggcgggcgcttgtagtcccagctacttgggaggctgaggcaggagaatggcatgaaccctggaggcggagcttgcagtgagccgagattgcaccactgcactccagcctgggggacagagcgagattccttctcaaaaaaaaaagaaagaaagaaaaagaaaaaaaatgtaaaaattagctgcatgtggtcaccagtgcctgcagtcccaaataggaggctgaggcagaaggaccacttgagcccagaagttcaagactacaggccaggtgtggtggctcacgcccataatcccagcactttgggagaccaaggtggatggattatctgagatcaggagtttgagaccagcctggccaacttggtgaaaccccatctctactaaaaacacaaaaattagggccaggcgcagtggctcacaactctaatcccagcactttggaaggccaaggcaggtggatcacctgaggtctggagtttgagaccaaccttgcctacatggtgaaaccccatctctactaaaaatacaaaaaattagccgggcgtgttggcaggcgcctgtaatcccagctactcgggaggctgaggcaggagaatcgcttgaacccgggaggcgagctgagattgcgccattgcactccagcctgggcaacaagagagaaactctgtctcaaaaaaaaaaaaatacaaaaattagacaggcatggtggctggtgcctgtagtcccagctactcgggaggctgaggcaggagaatcgcttgaagccaggagatggaggttgcattgagctgagatcacaccactgcactccagcctgagcaatagagtgagactcattttcaaaaaatagaaaaaataaaaagactgcaggccaggcgcagtggctcatacctgtaatcccagcacttcaggaggccgaggcgggcggatcatgaggtcaggagatcgagcccatcctgggtaacatggtgaaacctcgtctttactaaaactacaaaaaaaaaaaaaaaattagccaggcatggtggcaggtgcctgtagtcccagctactcgggaggctgaggcaggagaatggtgtgaacccaggaggcggagcttgcagtgagccgagattgcgccactgcactctagcctgtgcgtcagagcgagactctgtctccaaaaaaaaaaaaaaaaaagactgcagtgagccattactgtgccactgcactgcagcatgtctttaaaagaccctgtctcttaaaaaaaaaaaaaagtgcgttcagttattggaatgtgccatgattcttcttgctttgcccaaactctccctacaatgcttttccttcacttcttccctggtcaattcctacctgtccctcaagtctcacttagaatatgggtatggcctcacttagttactttcttttttcttcctttagacagggtttcactctattgctcgggctggagtgcagtggccaatcatggctcagcccagccttgatctcctgggcttaagtgatcctcccatatcagcctcccaagtagctggaaccacaggctcacaccaccgtgtccagctaatttttttttttttttttgagacagagtctcactctcgttgcccaggctagagtgcaatggagtgatctcagctcaccgctacctccgcctcctgggttcaagcgattctcctgcctcagcatcccaagtagctgggattacaggcatgtgccaacacacctggctaattttgtatttgtagtagagacggggtttcaccatgttggtcaggttggtctcgaactccccacctcaggtgatctgcccgccttggcctcccaaagtgctgggattacgggcgtgagccaccgtgcccggttatatccgggtaatttttgtagtaacaagatttcaccatgtttcccaggctggtcttgaacttctgggctcaagcgatcccccctgtcagcctcccaaagtgctgggattacaggcatgagccactgcacttgggccatttacctttttcatgaagcctatatcactatttccccaagtctgggtgagatgtccctatattcatcccagcggctgcccttatcacagagtgtgtgatagagcatggggctttacattagctacagtgggcagtgaatgccctctgaggacgaagcatttgcagtaaggcttgaaaaatgaggaagaggcggaggatagccagtacacagtccctgaggtgggaactgctgaatggggtacattgcagtgatagaaatcaggtcctcataatgtagagtgagtgaggaggggacaggcaggggatgaggttgaagagttgggaggctctggtaaggtgtttggacccaccatctccctggctccatcgccccacgtatggccatgcaggatgtagacagctgaaaatctttacctcgtgtccttgatccctatgcctgctgtgttccctgccttctctgattaataataaaattccattcatccttcaaggcccagctccaaaccatttaggaaacctccttccattctttagcaggaattaattgctcccttgtctgacgtcccacagcactaatcacacgctgacttgtatctcagctagctgtttatgccagtctgcccaccaacgtagtgagttccctgagggcagaggctctgtcttagtcacctctgtagccatctcctggtgtttagcaggtactcaatgtgacatttacttgactagtgggtggtgcctagtactactcatggcagaatagaaggaaaacaaaaataataacaacttatgctctatcacgttttcccattcattaactgatttcagctttgcaacaactctatgagacagacgggacaggcactattagacccattttacagatagggtagctaaggcccaatggcacacagcttgtaagtaatggggactaagtcccaatcttgcccccttacttcggattctgtgctgggaatggaattaaaccaagagtattttgaagctataatggaaagcgcttttctgggtggactagggagagatacttagtcagctgtcagggtttaacagcagctccatcaaagagggcacaggatttctctctctggcccaagcagctggaggggtccacagcaccatcctatagccctggaagctggaggaaaccccagcccgagaaagaagagacggtgttcgagtcaggtgggtaagatgacgtaaatgatgacttgtgagcagtggcctgcctctgttgccatgacaaccggagcttgactacttggcctttgcaaggttggccgaggcgggttcttcgttaactcgagattaaggaaggatatttaggggggagggtgtgtgtgtgtgcggcggattaaagacgaaaggagtatattcaacaatgactgtttagctcagtggttctccaccttggcaacacgttagaatcacctgcaacaatttcctgatgcctaggctgcaccccagaattaaattataatttccaggggtgggaaccaggcatcatagtatttaaatcttgccaggtgattccaattgcagctaaagttgcaaacccagcttttagctggtaagcggaattcctgtgaccttcctaagatggcgtccactcaaccgcttccgcctttacgtgggccggcagggggcgggcttcccaggggcgcatgcgtctcgcatctctccgctccctgctctctcctcctttttcccccgcctccattttgttcgcggacgctggggacggtgggagcagatccatttccgggttggcaaaaggggcggtggcggcggcggcggcggcggcggcggcggcgacggcgagaaagagcttgccggggggcgagcaggacaggacgaagccggagtgtaggcggcagaggattcgctcccagagcagctgcggccaggtcggaaagaggccggggcggctgggtcagtcgctgaaatgacctgcggacctgagtgggagggaaagtcgcggggaggggggctcggggcggggcttgagaagagaggggggcattagaggaggggccggagggggagaggggtcttgcgggtggggcctgaggggcggggggccgggggactgtatcggaagaacctggaggagagagggcgtggggaatctggggaggagtggtcgaatattggtatggggcgagcggggactggaaaaatggggaggaacgtttttgagagacaggcaataagggctcctgaagggttgggtgagttaaggcggcaactctgtgaggaacgaggtaatcgtgcgcaaaaagggagacgggaacggaggacctgttgggaacggctaattagcaggatgctgtgggtgaggagtccagtgtgacattttggggattgagttaggtgaaagctagtgtttgggaagatggctcgggaaactgcttacactagagggaatcttgagagcgttctttgaaaaggaatcagaatttagttaaaggttggattgagaatgttaagatgcgcattggaacgtctggagttgagggttcatgttgaagtggtgtgaagtgagggaagatggaatttttttttttttgttttaaaggtggggtctggctatgttgctcagactagtcttgaactcctgggctcaagcgatcttcccaccttggactcccagagtgctgggattacaggtgtgagccactgcacccggccaagatggaaatgttaaagtgttcagcatggcagtgtgtatggtcgagttttttatcaggaaggaaagttcttaaaaatagcattgaggcaaggaactgatatgtgatggaattcttttttctttttttttcttttaagagacgtggtctcactctgtcgcccgggctggagtgcagtggcatgatcatggctccttaaagcctcgacctcccgggctgaagtggtccttccacctaagccccgccaatagctgggaccacaggtgtgaccactactcccgcctaacgtgtgtgtgtgtatatatatatatatatatatatatatatatatatatatatatatgtatatatatatatttttttgttgttgttgttggagacagagtcttgccctgttgtccaggctagtctggaattcctgggctcaagtgatcctcctgtctcggcctccgcaagtgctgggattacagggatgagccactgtgcctggcccagaattcgttttttttttttttttgagatggagtctcgctcagtggcctaggctggagtgtagcggtgcgatctcggctcactgcaagctccgcctcccgggttcacgcccattcttctgcctcagcctcccgagtagctgggactataggtgcccaccaccacacctggctaatttttttttgaatttttagtagagacggggtttcactgtgttagccaggatggatggtctggatctcctgacctcgtgatccgcccgcctctgcctcccagagttctgggattagaggcgtgagcccctgcgcctgtccagaattcatattttttaaaggacttgaataatctgttattgctttgggctctcccagggtccccgtcctttttcatgctgttatttttgccttacggttttggtttttgactgtcttactgaatgtttttggctattctgttctccttttacaaatcagaagagaaccacagggaataaggacagttttagcctacctatggatttagtaaataacttcaaggcaaattattaagctctcatttttttcccctttgaaatataggttttctctgtccctgcctctaaaagtttgtcttaacacatgggatctttaaagtggttgcatagaagtgatctctgaaaatgagattgagatattgatatttaaaagacatacaatggtgcacctgcctgtaatcccagctacttgggaggctgaggcaggaggattgcttgagtctaagagttcgagaccattctgggcaacgtagcaataccccatctctctctctgtctctttttttgtttgtttgtttaagacggagtctcgctctttcacccaggctggagtgcagtggcgtgatctcggctcactgcaacctctgcctgccggattcaagcgcttctcctgcctcagtcccccaagtaactggtactataggcatgcaccaccacgcccagctaattttttgtattttagtagagatggggtttcaccatgttggtcaggctggtctcgaactcctgacttcaggtgatccacccacctcggcctcccaaagtgttgagattacaggcatgagctaccacacctggccgcatgtttagttttttaactcttattaatgtcaacttttaaaagtaaaaatttcatattgtgttacattggttgccatcaagatgaagatagggaagttaagagttggggaaggtggagatgaatgaagtcaattgatgaagactagtagaatgtagtgttggtttttttatttgtttatttatttattttgagacagagtcttgctgtattgcccaggctggagtgcaatggcacaatcttggctcactgcaacctctgtctcctgggttcaagcaattctcctggctcagcctcccaagtagctgggattacaggcgcgtgctgccacgcccagctaatttttgtatttttagtagagacagggtttcaccgtattggccaggctggtctcgaactcctgacctcgtgatctgcccaccttggcctcccaaagtgctgggattacaggtgtgagccaccgcgcctggccgacctgtctcttaaaggaaaacaaggctgggcgcgctggctcatgcctataatcccaacgctttgggaggccaaggtggtggatcacctgagattgcagtgagctgagatcgcgccattgcactccagcctgggcaacaagagcgaaactccacctcaacaacaacaacaacaacaacaaaaggaaacatgtttttctgtttcttcctcttagccttgctcatgtgtgtgtgtgtttgtgtgtgtgtgtgtgtgtctgcgtgccagccagggaagaactggttttgatttgatgcatattcagtttttttttttttttttttttttttttttttttgagacagagtttcgctcctgctgcccaggctggagtggaatggcgcagtcttggctcactgcaacctccgcctgccggattcaagcgcttctcctgcctcagtcccccaagtaactggtactataggcatgcaccaccacgcccagctaattttttgtattttagtagagatggggtttcaccatgttggtcaggctggtctcgaactcctgacttcaggtgatccacccacctcggcctcccaaagtgttgagattacaggcatgagctaccacacctggccgcatgtttagttttttaactcttattaatgtcaacttttaaaagtaaaaatttcatattgtgttacattggttgccatcaagatgaagatagggaagttaagagttggggaaggtggagatgaatgaagtcaattgatgaagactagtagaatgtagtgtttgtttttttatttgtttatttatttattttgagacagagtcttgctgtattgcccaggctggagtgcaatggcacaatcttggctcactgcaacctctgtctcctgggttcaagcaattctcctggctcagcctcccaagtagctgggattacaggcatgtgccacctggctaatttttgtatttttagtagagacagggttttgccatgttggccaggctggtcatttactaattccacctcacacttgatactagagtagtgtttaccctagctggtactgataagttatgtgatagcaccaaggtgaaatgcaggagaggtgtgaacattggagttttcaggttttactgatggcttttacgaagggaagagattctagactcactaggtgtttttaggaaaaaaaaaaggcaagaggcaagagacagaagtcttgttctgttgaagagaaaatttttttttgggttttttttttttttttttgagacggagtctcgctcagttgcccaggctggagtgcaatggcatgatctctgctcactgcaacctccacctcccaggttcaagcgattctcctgcctcagcctcctgagtagctgggtgccatcacgcctggctaatttttgtatttttgtagagacgaggtttcactgtgttggtcaggctggtctcgaacttctgaccttgtgatctgccagtctcggcctcccaaagtgctgggattacaggcgtgagccaccgcgcccggcccgagaaaattattaaatgttctttctttacttgtgttctctgattgggagagtaacctggtatatgttagtctgttttcctgctctgaaataactgtgaaattcatgggctcttggttcaggcagcttcagcaaacatagtcttcttacaaccccaggaagagttgcaggctacaaaatatatgtacttatttgggagtaaaaacctgcttaatattatgctattgcaacctacagtgtacctttttggtttgttttttaaggggattttgagataacatatggaggctcggtgctcctgggcggacttttggtacagcctgcttattttttttttcttttcttttcttttttttttttttttttgagacggagtctcactttgtcccccaggctggagtgcagtggcgcaatctcggctcactgcaagctccgcctcccaggttcacgccattctcctgcctcagcctcctgaggagctggactacaggcgcctgccaccacgcccggctgattttttgtattttttttttttttttttttgtagtagagacggggtttcaacttgttagcgaggatgtcttgatctcctgaccttgtgatccacccgcctcggcctcccaaagtgctgaaattacgggcgtgagccaccgcgcccggcccagcctgcttctttaacataatgattttccatttttcctatcctgtcacagttttccgttgctctgcttgagccagtcctatgtagaaagtggcaaattacacattttttctccccttttagtctctggtggacatcttgtctgtgtcacagtttgatactaccaaattgaaaggattcttcactgcttcagatggggagggtgacagaagctgagctgtttcctgggtcagataatggcctctgtcaaagcaaagaatagttgtagagacacaaactgggcccttgaagctgtgactaacattttggcaacatgcatccctttgccaaataacttcttttcttcttgagtgtgattgttgatctccttctcaaagtaggctcttgttgctactattcttcacacaactcccaagcaaaagttggcagagttccggttgactgactgtgtcttgagggatatgccccggattagagtggatggggcgttccatgtcaaaatgaggttcattggcagatcctgagagctgctttgcaaagaaatagaggcagtactctttactgaatgttcttgcggtcctttatctttcttctaaattcaagtctgtttcttattcatctagtgattaaatgcagaatcattgcctttgcctagcttcgtgggcattgtggaagagaagacagtatttccaactttttttttttttttcttttctcacaagccattgagcctgaggaactacaggctaaatttatgagcatttcttgatatctacagagggctactaaaaaaaaaatgctgaatagacctttatggggaacaacaatgttaataggaaaaaaaggtgatatgtttgctaatgtctatgtcagtcttaactctctttaagattttggctcattttggcttaagagcctgcagaagtatgtaagttatcaaataggggagccaggaattggtttcttccttgccatttaagcttggcaaagttagagcaatttggaatggctatccaacaatgtgttctacttagtaaatactctcttgtttttcaggggatagttagctaaaggtagggttatctccaatatgttttgggatggatcgtgaagatcattccctttttattttgagacaggatctctctctcttgcccaggctggagtgtggcggcgtgatctgtagcctcgacctccccaggctcaggctcaggtgttcttcccacttcagcctcctgtgtagctgggactacaggcgcacgccactatgcctcactaatttttattttttgtagagatggggtttcgccatgttgcccagcctggtcttgaacttttgccggcctcccaaagtgctgggattataggtgtgagccaccaggctcagccattataattgattttcaaaaaaaatttagtttcttaagcttcatggattcaaattgagtgccatttggattttgaggcccctcagtggaaataatttgtttttagcaagtaattatgatatttctaaagtgcaaattcactgacctactttctgtgcttctggaaatgctgaatcgaataatctttttttttcctcccaataatccctctgactgtgaaaacattctccatatgtattcagattgggatagttggtaaaaaaaaaaaaaaaaaaatttttttttttttgagatggagtctcgttctgtcggccagtctggagtgcagtggtgcgatcccagctcactgcaacctccacctcccgggttcatgcgattatcctgcctcagcctcccgagtagctgggattacaggcgcacaccaccacacccggctaatttaatttttttttttttgtatttttagtagagacgggatttcactatgttggccagactggtctcgaactcctgacctcgcgatccgcccaccttggcctcccaaagtgctgggattacaggcatgagccactgtgcccggcctttggaattttcttctaaggtagtacactagtatgagatgcgatgtctgagatttgtggataagtggacttttccttcttccattcctgccctcccagtgctcacctagtagggaggatgtttattatctaagatccagatgtgagacatttaaactgcttctttccttgtcttagaaataagaacagaactgtttttagcaaattttatttttttaattttttaaatttattattattatttttgagactgagtcttgctctgttgcccaggctggagtgcaatggcacaatctcggctcactgcagcctctgcctcctgagttcaagcgattctgctgccttagcctcctgagtagctgagattacaggtgcacgccaccatgcccaactaatttttgtattttttagtagaggtggggtttcaccttgttgcccaggctggtcttgaactcctgacctagtgatctttccgcctcagcctcccaaagtgctgggattacaggcgtgagccaccacgcccagcctatttatttatttttttttgagacagagtttcactgtgtcagccaggctggagtggagtggcaagatctgggctcactgcaagctctgcctcccaggctcaagcaatctcctgcctcaccgtgtcaagtagctgagattacaggtgtgtgccaccacgtccagctaatttttgtatttttagtagagacggggtttcaccatgttggccaggctggtctcaaactcctgacctcgtgatctgcctgcctcggccttccaaagtgctgggattacaggtgtgagtcactgctcctggccacaaatgttatattttaaataaataatacaaaatttaaaagataaaaaagtatataagcaggatggtggccatggaagtcagaatccactaaggagtatgtatcaactcacctgccaagaaaaagaaagtatatagtgaatacccttggaaacatctatgtttgtcttcctatcaatccagttcatcttcccagaggcaactcgtattattattttctttagatctgttccaggctggttgcggtggctcacacctgtaatcccagcactttgggaggctgaggcgggcggatcacctgaggtcagaagttggagaccagcctggccaacatggtgaaaccctgtctctattaagaatataaaaattagcggggcatggtggtgtgtgcctgtagtcccagttactcgggaggctgaggcacaagaatcacttgaacctgggaggcggaatggtgagctaaaattgtgccactgcactccagcctgggtgacagagcaagactttgtctcaaaacaaaacaaaaaacaaaaaaagtttgttccagagataccaggtacatataaagcaaatatgtatatttcttgtttttttttttgttgttgttgttttaataaatgtagcacactgttaatactatctgtatcttttgcttgtttttatacctctttttgtttttttttttttttttttttttgagacggagtctcgctctgtcgcccaggctggagtgcagtggcgggatctcggctcactgcaagctccgcctcccgggttcacgccattctcctgcctcagcctcccaagtagctgggactacaggcgcccgccactacgcccggctaattttttgtatttttagtagagacggggtttcaccgttttagccgggatggtctcgatctcctgacctcgtgatccgcccgcctcggcctcccaaagtgctgggattacaggcgtgagccaccgcgcccggccatttttatacctcttttgactgttactccctatcagcaataaagatacttggcacctaccttacactgatagacatacacagtttccagtcttttgctattacaaactatgctgcagtgaagaagcatatatatttggctctttgcatatatgactgtgtctgtagggtaaattcttagaactagaattgctgaagctgattttttttgatgttcgttattcatttattcaacaagaatttttgagttcctactgtgtgccaagtactgtggtaggggatgcaggggatgcagatagggcagtgaacaaattttcttggtctttttttttttgagacagagtctctctctgtcacccaggcgggaatttagtggtgcaaacatggttcattgtagcctcaaccttctgggctcaagcagtcctcccacctcagcctcctgtgtagctgggaccacaggtgtgtgcacaatttttaaaattttttgtagacgtgaggtctcactttgttgcctaggctggtcttgaactcgggcttaagcagtcctcctatctcgaagtgccataattacaggcatgagccaccacacctggccctgacttggtcttccacttacggtggaagactttttttttttagacaaggtttcattcccatcttggctcactgcgacctccacctcctgggctcaagtgattctcttgccttagcctcctaaatagctgggactgcagatgcatgccaccatggctaatttttgtagtttttgtagaggtggggctttgccaagttgcccaggctggtctttttttttttttagatgagttttgttcttgttgcccaggctggagtgcaatggcatgatctcaactcaccgcaacctctgcctcccgggttcaagcgattctcctgcctcagcttcccgagtagctaggattacaggcatgcatcaccacgcccggctaattttgtatttttagtagagacggggtttctccttattaggctggtctcgaactcctgacctcaggtgatccgcccacctcggcgtcccaaagtgctgggataacaggtgtgagccgccgcacctggccaaagacatttattcatttatttatttatttgttttagacagagtctagctctattagccaggctggagtgcagtggcatgatcttggctcaccgcaacctctgcctcccaggttcaagccattctgctgtagcctcccaagtagctgggactacaggtgcaccaccatgtctggctaattttttctgtatttttagtagagatggggtttcaccatgttggccaggctggcctcaaaactcctaacctcaagtgatcttcctgcctcggcctcctaaagtgctgggattgtaggtgtgagccaccgtgcctggcccaaagacatttattaaacaaataattattactgttgctgtaaatgctgtggagacagctaatggttagcccatcccaggttgattgagaggaagggcagtcagagaaggtctctgaggaattgacttttaagggtgaaacctaagaatgaagggaggacaaaagactgacctaggtagaggagatggcacaggtgaatgtcctgaggagggaaagaatgtttgtattttgaggaattgaaagaggttccagtgtggctggagcttagggagtgaaaaacagacaggtaggaggcaaggcttcagaatgtgagctgtcctaaaaaatgggtaaataggctggcatggtggctcatgcctgtaataccaacactttgggagaccaaggtgggaggatcacttgagcctagaagttcacaaccaatctgggcaacatagggagaccccccagtctctatataattaaaatattagctgggcatggtgatgagcacccgtggttctagccgctcaggaggctgagggaggaggatcacttgagccccaggagagggaggttgcagtgagctgttgcagcaccactgcactccaacctcggagacagagtgagaccctgtttcaaaaaacaacaactaaaagagtaataggatagtgaattttgaggtcagcttctaaaatagggcttttttttttcctgtcagttcttttactagtgttgatgatgagaccatcagtgtcataaagaagtctgatgcttgtgcagtgaaacagtttttataagaactttcctggatgaaacctattcttttagtcttgatttctcataggtcctgcaaatcaaacttggttggctggattagctcttaaaattttaggatcttagaaattgttttggagattaggcttattggggaacaatttttagattatgggggatgatgggattgttagtttaccagacttgctatttaggaaacagaaaacctatttacttttagtgggaggagcagggaggagtgtttaaaaaaagaaaaaacttatttactgttagggaatgttgactgttttaaaaataatcttcatggtgctagggagagaacagatgttcttttattttgaaccgatgaatatactgtcatacccatcatctaggccatatgtcttagcatgacacgtaagtcttgttggacacgcaaggtagcccaagggccattataattctgaatatatgaaagtgtttttatctgcaagtgtattgacttttgttcagaaatcacagtacttaaaacccagatggtcctgtttgatttagtacttctgtttaattggatcagcttgccctgtttttataacttaaagtagactcttgacttagcagcccatcactagtgatcaagggacggaaatgtgcaaattttctagcatttcagcaaggagcatctgtgtttctgatggcttaagggtattagaatgtaagagaagagactccttgacaatgaaagtcacagatttgttattagattatctgtggtgagttgggacttaatatattatctttgaaatgaggcatgacacttgtctccatgtgaagtctggatcagcattttatggagcatctgtttaagttttctttcaggccttttcttagtggggactgtcatcactggattttccttctatctgactgttctctgtgcttttctacctttttttttttttttttttgagacggagtcttgctctgtgtcccagctggagtgcagtggcacgatctcagctcactgcaacatctgcctcccgggttcaagcagttctctgcctcagcctctgagtagctgggattacaggtgcccgccaccacgcccagctaattttttgtatttttagtagagacagggtttcaccatcttggccaggctggtcttgaactcctgaccttgtgatccacccgccttggcgcctcaaagtgctgggattacaggcgtgagccaccatgcctggccgcttttctacttttatatatggagcgtgcagatgaagcctggctcttggaagttgggagctagtaataatatgagatatggctagcttaaaatctgagaagagctgtttttttttggtcatcaatgactaggtttcagcctgcctcgtaattgtattttaaatctaattaacagtttcttagaatgtctaaagattctttgattttttctttctttttttttttttttttagcagttagtggcattacattgaaaacaagacctaaaaagagagttaaggtaattgattttactttttttttttttttgagacaggatctggctttgtcacccaggctggagtgcagtggtgtgatgtctgctcactgcaacctctgcctcctgggctcaagcgatcttcccacctcagcgtcctgagtagctgggattgcaggcacatgccaccatgcctggctaattttttttttttttttttttttttttttgagacagggtctcgctctgttgcccagaccagagtacagtggcgtgatctcagctcactgcagtctgtggctcccaggttcaagcaattctcatgcttcagcctctggagtagctggaatcacaggtgcacgccaccacacacagctaatttttgtagttttagtagagacagggtttcaccatgttggccaggctggtcttgaactcctgacctcaagcagtccacccgccttggcctcccaaagtgctgggattacaggcatgagtaccaccatgcctggcctaatttttgtatttttgtagatgcttttgccatgtttcccaggctggtctcgaattcctgagctcaagtgatccaccttggcctcccaaagtgatgggattacaggtatgagccaccgtgcccggccagtaattgattttaatattaatttctctttttttttttttgaggtggagtttcactcgttgcccaggctggagtgcaatggtgtgatctcggctcactgcaacctctgcctcctggttcaagcgattctcctgcctcagcctcctgagtagctggaattacaggcatgcgccaccatgcccggctaattttgcatttttagtagagacagggtttcaccatgttggtcaggctggtcttgaactcccgacctcaggtcgtctgcccgcctcggcctcccaaagtgctggtattacaggcgtgagccaccatacctggctcatttctctatttttgtgcatacctttgcaattaattttggttatgatttcctatggtagattggaagttgctctcatatttgccctctgttagagtaagctgtggggttgttgatcactgtgtggttacacccaggctgtggcagagattcaggtcacattagccagcctgctgccatttgagttgagtcaagatactgattctagagttgggcttaattaagtctttaaaattttttgttttgtttgggattttctattctccttaactgcattggtaccagatccaacgttgaccttatattttgaaattttggtcagtttgtttatatggtgattttgcttatacagtgttagggttttttgatttttggtaattgttttttgtcaaaatagtaagaatacataaagaatcagacagtactacaaggcttataattagaaaaaaaacactactttatttctgcttgtttgtttttaaccacttttgcaattttttttccctgatgtatattatccatatttctatatagtatgtttaggctgtttattctttctttttttttttgatagatgaagtcttgctgtgttgtccaggatggcattgaactcttgggctcaagcagtcctcctgccttagtggggagtacaggtgtgcaccgctgcacctggctatacagttctttcttgagttttccattcttacatattatctgttgaggctgaaggtgatggcacaagcctgtaatcccagcactttaggaggccgaggcctgagattgggagtttgagaccagcctggccaacatggtgaaaccccgtctctactaaaaatacaaaattgggccgggcactgtggctcacacctgtaatctgaacactttgggaagccgaggcgggcggatcacctgaggttgggagttcgagaccagcctgaccaacatggagaaaccatatctctactaaaaatacaaatttagccaggcgtggtggtgcatgcctgtaatctcagctactcgggaggatgaggcaggagaattgcctgaatgtgggagacagaggttgcggtgagctgagattgtgccattgcactccagcctgggcaacaagaagaaaactccatctcaaaaaataataataaaaaaaacaggccaggcacagtggctcacgcctgtaatcccagcactttgggaggctgaggcaggcagatcacaaggtaaggagattgagaccatcctggccaacatggtaaaaccctgtctctactaaaaatacaaaaattagctgggtgtggtggcaagtgcctgtagtcccagctactcgggaggcgcacgcctgtagtcctagctactcgggaggcgcatgcctgtagtcccagctactcgggaggctgaggcagaagaattgcttgggagaacctgggaggcggaggttgcagtgagctgagattgcgccactgcactcaagcctggtgacagagtgagactctgtctcaaaacaaacaaacaaacaaacaaaaaaaacaaccggaaattatctaggtatggtggcatgcacttgtagttccagctatttgggaggctgagaggtgggaggatcacttgagctggtaggtcaaggctgcatgcagtaagccatgatcacaccactgcactccatcctgggtgaaagagcgagaccctttcttcaaaaaaaaaggaaaaccatttttgttatttcaaagaggatattttagatgcttacaagaccattggaaggctggaagagcatagatcagggaaacctcgttgcaggaatttcaagaaatggcttctgttaataatcttagctgccttaagcaccaaaacaggcagtttgcagaaaattagaaatggctgcaaaccacatgtctgccatctgtccgaggccacgcacgctctcgttgctactggagaagcaataatggcatctacccttcttccattgtgcaaatcttctttttttccttttttttttttgagacggagtcttgccctgtcacccaggctggagtgcagagtggcgcgatctcagctcactgcaagctctgcctcctgggttcacgccattctcctgcctcagcctccctagtagctgggacaacaggcgtccgccaccacgcccagctaattttttgtatttttagtagaggcggggtttcaccgtgttagccaggatggccgcccgcctcggcctcccaaagtgctgggattacaggcttgagccaccacgcccagcccattgtgcaaatcttaagtgttggtagaatttaaaccacaatggcactgatggaggattctgataaatgtagttcccaggcctccagatgaatccagaaggaagtagaagtgaaagttacaaaagaaaaaaaatttagcgcccagtataatgactgtatcattcgattacctttacttccttgtgtagtttttccctagacatagtaattgtcattcttttccttccttcccttttttgttttctgcttgttttacggaaagtcactgattcatccctaaactctgacaggtataaacctcttctcatcattgaagcacattagtggagcacctcttccagaggctttatgaaaggagtctttggagagtgagactttttttttttttttttttttgagacggagtttcgctcttgttgcccaggctggagtgcaatggcacgatctcagctcaccacaacctccgcctcccgggttcaagcaattctcctacctcagcctcccgagtagctgggattacaggcatgcatcaccatgcccagctaattttgtatttttagtagagaacgggtttcttccatgttggtcaggctggtctcgaattcccgacctcaggtgatctgcctgtcttggcctcccaaagtgctgggattacaggcatgagccaccgcgcctggcctctggagagtgggacttttttgaggccttgcatatctgaattacctcctttcttccttcacacttggcagtttgactggattaaaaaaattttttttttttttgagatggagtcttgctctgtcacccaggcccgagtgcagtgatgggatctcggctcactgcaacctccgcctcccatattcaagcgattctcctgcctcagcaccgccccgagttgctgggattataggcatctgccaccacgcctgggctaattttttgtatttttggtgactaaagggtttcattcaccgtgttggccatgctggtctcgaactcctgacctcggggtgatccacccgcctcagcctcccaaagtgctgggattacaggcatgagtcaactgtgcccagcctagatataaaattttctactggagattatatttctttggaaattataagcccttgctttgtggtcttctaacctttttttttcttttgagacagagaattgctctgttgcccaggctggagtgcagtggtgcaatcttggctcactgcaacctccacctcccggttcgagcgattcttttgcctcagcctcccgagtagctggaactacaggcgtgtgtagagatggagttttgccatatcagccaggctggtctcgaactcctggcctcaaccgatcctcctggcttggcctcccaaagtgctgggattacaggcatgagctgcctcactcagcctctttttttttttttttttttaagacggagtctcactctgtcgcccaggcaggagtgcactggtgcgatctcagctcactgcaacctccacctccctgggttcaagcaattccctgcctcagcctcctgagtagctgagattacaggcgcccaccatcacggccggctaatttttgtgtttttagtagagacggggttttaccatcttggccaggctggtcttgaactcctgatctcatgatccacccgcctcggcctcccaaggtttctaacttttaatagtggcattatgaagtttgatgctattttgactctagattctttgtatgggatctgtgttttttctctggaagactttaggatcttgcctttatccctgacattctgaaatgcaaccatgttgtgccttggtgtggatatttaaaaattcatcatactcagcattcagtggaccttttcagtctggaagcttatttcaatctatcctgggaaattttcttgtattatttcttgtattgataatgtattctcactttgataattatttatctcctctctctttctggaaacgctgttactcagatggtgaaactcctaggttggtactctaatttttttttcctattcaatttttcctttttttttttttttttgagacagagtctcactttgtcatcctggctggcatgcagtggtgctatctcgggtcaccgcaatctccgcctcctgggttcaagggattcccctgcctcagcctcctaagtagctaggattacaggcgtgcgccacaacgcccgcctgatttttgtatttttagtagagacagagtcttaccatgttggccaggctggtctcaaactcctgacctcaaatgatccgcctgtgttggcctcccaaagtgcttcggataacaggtgtgagctaccacgcccaaccctaatttttttttccttcattcaatttttgtgagatttccttagctgttcttccgactctctgttgtcgcttaattcctgttatcagtttgtttaatttccaagggctttttgttttttttttagacagagtcttactctgtcgcccaggctggagtgcagtggcgtgatctcggctcactgcaacctcggcctcccgggttcgaatgattttcctgcctcagcctcataagtagctgggattacaggcacacaccaccacgcccagctaatttttatatttttagtaaagatggggtttcaccctgttggtcacggtggtctcaaactcctaaccctgtctctactaaaataccaaaaaaaaaaaaaaaaaaaattagccaggtgtggtgacgtgcgcctgtaatcccagctactcaggaggctgaggtaggagaattgcttgaacccgggaggcggaggttgcagtgagtcaagatggtgccactgcactccagcctggcaacagagggagactccgtctcaaaagaaaaaaaaaaagctcttgaccttgtgatccacccgccttggcctcccaacgtgctgggattacagacgtgagccaccacccctgtctccaagggctctttttattatctgaattttacatgtatttttggacattgtcaggaattctgttttgttactttgattcttatctttcgtgttagagattttcttcagttgtttgataattcttagctgcttattcaatttttattatttatttgtttatttatttgagatggagtctggctctgttgcccaggctggagtacaatggcacgatcttggctcactgcaacatctgcctccccagttcaagcaattctcctgtctcagcctcccaaatagctgggattacaggcacccgccatcatgcccggctaatttttgtagttttgtagagacagggttttaccatgttggccaggctggtcttgaactcctgacctcaggtgatctgcctgcctcggcctcctaaagtgttgggattacaggtgtgagccactgcacctgcccttatttatttatttattattatttttttgagacagaatctcactctgtcgtccaggctggagtgcagtggcacaatctcggctcactgcaaacctccgcctcccgggttcaagcgattctcctgcctcagcctcccgagtagctgggattataggcgcttgccatcagtgtggctaatttttgtatttttagtagagatggggtttcaccaccttggtcaggctggtctgaaactcctgacctcatgatccgcccgccttggcctcccaaagtgctgggattacagacgtgagccaccgtgcccggccatttattttttaagagatggggttttgctgtggggctcaggctggattcaaactcctgggcttaagttatcctcctacctccaagtagctgggactacaggctcatgccactgtgtctggcttctgtttattttattttatttatttatttatttatttatttatttatttatttatttgagacggagtctcgctctgtcgcccaggctggaatgcagtggtgcgatctcggctcactgcaagctccgcctcccaggttcacgccattctcctgcctcagcctcccaagtagctgggaccacaggcgcccgccaccacgcccggctaattttttgtatttttagtagagacggggtttcactgtgttagccaggatggtctcgatctcctgacctcgtgatccgcccccttcagcctcccaaagtgctgggattacaggcgtgatccactgcgcccagccttggcttctgtttatttttaagaatgtgacactaagaagctcatcaagtggtggaccctactatagggtattgggattacaggcaccctggcaggctggtaaaaggactcctccagtcccctgcctagagagtataagccagtggcaggtgtttgagtgtaagtctggctgccaatgtttttggagccaagtgagagaaaggagctggggaggtaggagaggtctcaccgttgactcattaggcttttcacttgatacccttatttccgtcactgcccttagctgtgactagttcctttggactctttggttcagcttttctttttttttttttttttttttgagacggagtctcactctgtcatctctaggctggagtgcagtggcgctatcttggcccactgcaacctctgccacccggcttcaaaggattctcctgcctcagcctcccaagtagctgggattacaagtgcctgccaccgtgcccggctaatgtttgtatttttaatagaggtggggttttaccatcttggccaggctggtcttgaactcctgacctcaggtgttccacccaccttggcctcccaaagtgctgggattacaggcatgagccaccgagcctggcctggtttaacttttctaatttgcctggcagcatggggagggatggaggaatccatttgttatacagacttttctttttttttttaagatggagtcttgctctgttgcccgggctggagtgcagtggtgcaatctcagctcactgcaacctccacctcccaggttcaagcaattctgctgcctcagcctcccaagtcgctggcaactacaggcatgagccaccacaatcggctaatttttttgtatgtttagtagagacggggtttcaccaggttgaccaggctggtctcgaacccttgagctcaagtaatccacctgcctcggcctcccaaacttctgggattacaggtgtgagccaccgtgccagtcccagactttcaaccagtcctcctgtttagccccttctacactatcaccccatcttcccgaggtaccaggtgcctctaatttctgagacgttttgattcagaagttcatctgtggtgggaatctgcttgcttcttcccactgcagtgttttgttttttttttttacttttgtgaagttatttatcactagtgcatttgctttttaccttccaaaactttgttgacatctctctctctgctgtctcctttcccagtttttttgcttgttgtttggtttatgtctttataaaaaaaaatcctggccaggcacggtatctcacgcctgtaatcccggcattttgggaggctgaggcaggcagatcacgaggtcaggagatggagaccatcctggctaacacagtgaaaccccgtctctactaaaaatacaaaaaaattagctgggcgtggtggcaggcgcctgtagtaccagctactcgggaggctgaggcaggagaatgacatgaacccgagaggtggagcttgcagtgagccgagatagcgccactgcactccagcctgggcaacagaatgagactccgtctcaaaaaaaaaaaaaaaaaatccttttgctgtaattttaatggtgttttatgatggaacattgattaatgcatgcaatatattatgtttaacatgttattcaacatattcatcagcttttccttgccaatatccattcagacaccacagtgtctttacagttgattactaatactcctttagcatagtgttttctagacttccctaacaccaagaatcacttaaagtgcttgttggatatacagattaccagatcattctcctggaaaacttctgattttagttggtttagattagcgcccagggatctttttttaaagtgtgtttgtttttaaacaaatgccctaaatatgtcttatcttcaggcaagtttggaaaccctgctttagaaggattctttttaaaccattaatgccatcttacatctccatggcaaactccttagccttcccctaatactgcttttgtattcagactctgttttagcctgtctagctttggtctggatttctgaattagcatgtgtgtctttcctctgattaactcccctctttagtattaaatgttggctgatggtaataactttgggcttgtgtgacttcattttttttagtcagcgtctctaaacccgctcctgggatgtacaggggaggaaatactagttatgaacattgagctgctctgcaccaatttactaagtccaggaatcagtgtttttggtgaaatggaaaattgactcaggctttgaaaacagatgtcctaatctgccttgggtttatgcagcgtcatttttggagatgttgaagcactgtgatttgaagtttgtttttaactttacaatcaaaaggacacaattctcccttttgtattatagattcctacgcctagaaaagaaaaagggttgtatcttttgctgccagtctgtaaagtatctggaaatgtgtttgcagctgctccttggttgtgaattgcttagaggttaagagccaaatagtacttgtcttagcagtgttgcagaggctaactgtggtaccctagttctcagttcttggaaatcttgtggctgttattaactaaaatacagctgaggaggccatgttggctctgacatagagttgatttgcattctaagatgagcagctctatagaaatagctgtaatacaattttacaacttccattgaaacagttttttggaaggctatggcaggaggattgtttgaggtcaggagtttgagactggcctgagcaacatagtgagatcctgtctttgcaatcaaaataaaacgattagctggatgtggtagtcccagctactcgggaggctgaggtgagaagattgcttgagcctgggaggttaaggctgcagtgagctgtgattgtgccacttgcactgcaatctgggttgtagggtgagaccctttctcaaggaagaaagaaagaaaaaccaagaaattttttgttgttgttgttgttgttggtttgttttttgagacagtctcactctgttacccagtggcacaatctcagctcgctgcaacctccgcctgccgagttcaagtgattctcctgcctcagcctcccgagtagctgggattacaggcgcccgccgccacgcctggctaatttttttgtatttttagtacagacggggtttcaccatgttggccaggccggtctcaaactcctgaccttaggtaatccacctgcctcggccttccagagtgctgggattacaggcatgagccactgtgcctggccaagaaacagttttgatgaacaaagtcacaaaaacaaagctacatcgaaagtgttattgtctcattgattattggtcactggctgtgttataaggcatgactttgaactattactgatttactgcagttgactattttctgtacacgtccgcctatctcccagtgctgtacttcagtgctttcaggataatgagattttttctttgccttgaggggttgggcgtgaggtcattccctgacttctgttttggatgattttcagatatttaatttacatggcttttgcattagttattcctagtctgtctttttaaatgaagctttctttgcagctctggttatttaattgaacacaggagtagacttctcattgatttgtcatcattttagatgagaggactcagctcctgggctgccttgtatctgggaataacccatagtatctaatatttaccacataaggtagtatatgaaggtagtcttccgaatttacatttttagggctttaaaaaaataatctggggctggtctgatggtagtgggttatcagagcttattaacattagtgtcactgcagttggtatacaaaccccccactgctaaatttgactggctttaaaaaaaatctgggggaagaggaaagagtcacattagtggggaaagctgcgttttggggatgcattatgtttttgttaaaaaaatatgtttgaaagaatttcatcattcagtagttatatcttcttcctccttcattttctctttcagagaggagtaaaacatccaggtttcatttgttgtagaagtcctaggatttttcaggtttttttttttaagacagagtcttgctctgtcgcccaggctggagtgcaatggtgccatctcggctcactgcaacctctgcctaccgggttcaagcaattctcctgcctcagcctcctgagtagctgggattacaggcatacgccaccacacccggctaattttgtattttttttttttaagtagagatggggtttctctgtattggccaggctggtctaaaactcctgacctcgggtgatccacccacctccacctcccaaagtgctgggattacaggagtgagccaccacgcccggcccgatttttcagttttaatattcatgatggttatgtgattttttttattacttgttggatcagtcagatttgctgcatagttgaatttctgtgatgaaaatttctgtagttgaaaaatttttttcccttaagtaaccttggaattttaattaattccatctctacatgtgatagaaatctgtttcaccagaggtttgactgaattgaatttcaagaagtggtggcactttctccattgagaggagagggctgtgagctatagaaaaagcctttttttggagtggtagtggtaaaatgtgtgtaacatgaatgttattctagtctgtttccttgtactttagagaaaccagaaacactttagtggaaaccctctgttatagtctgtcctagaacacatggaggcaagtttttcattcctcttgacattattccctgtgtgattataggaacctgtttggttcctgccgttgttggctcctggagtggcatgtgactactcttaggcagctcctggctcttttctcattttggggttctttggcctagggactggatgccattatgccattgtagtaatgagctcctacctcccatgctggattgcttttcaggagcaaagctgaaggacagctgaacaggtgggcagattaccaacaggtgacttttaaccctggaaggccttcagttagtacttagtctctggatgagattaagccaggagatcaagtatagtctgtgggattaatgagataaccgatcgaacttctggtttgagtgtgaagctgtcggttcatttaggtttctttggttttacagtgttggtgtattggacagagaaggggactacttttggatttggaggatggcctatatataaagcctcagatttcatctcttctcactctgttctagctatcctggtctttttactagttctctaacacaccaactacattcccatgttagaattttttcacttgctgttatttcttttcggaatgctctttccccagatgtttacatggcatgctctgctcatggagagacttcttgggagagccagatactctcccccaatggccctttccctgtgactgtattattttatcattattattactattttgttgttgtcgtggttaaattctcctagatcctgaagcctgcaaccctatccaaaggaagactctaacctgggcagctgtagtcccagctactggggaggctgaggctggaggattgcttaagcccagacgttcaagaccagcttaggcaacatagtctggacaatctatctctaaaaaataaataagtaaaacaaaagaacattccagtctattcctatactctacctttatgattctctgttttttttactccttttatcagtaactgttatactgagattttatttcttccttcttacactagaatgtaagctccaagacagtagacgcttgtcttgctcatcttctagaacagggcttagcaacctcagcattgttgacaatgtagaccagataattcttttttttttttttgagatggagtcccgttctgtcgcccaggctggagcgcagtggcacgatctcagcttactgcaacctccacctcccgggttcaagtgattctcctgcctcagcctcctgagtagctgggattacaggcgcccgccaccatgcttggctgacttttatatttttagtagagacagggtttcaccatgttggccaggttggtcttgaactcctgacctcaagtgatctacccgcctcggcctcccaaagtgttgggattacaggtgtgagccactgcacctgtcctgaccagataattctttgttgtgggcggctgtcttatgcgttggaggatgttgagcagcatccttgttttctattcactagatgccagcagcactccctaccctagttgtgacaaatatgtcaatgacattgtcaatgactctggggaacaaaatccctcctggttgagagccattgttctagaaaaatactttggcactcagtgggtgcttcaatatttattaagtggttaagttgtggatacttaattggatgatggatgcatgagtgcattcagcatattaaaattttttggagcattgaacaacacgtatagccttgtgtttctttctttcctcttttcatagatatctccattcttctgtctgttttctgtttctggcatgttgatccattccttgctgcattttcctccacccagacttgcttgctcttttagacaatgctactcttttttttttttttttcctgagtctcactgttgcccaggctggagtgcagtggcgtgatctcggctcactgcaacaccttcctcccgggttcaagcgattctcctgcctcagcctccagagtagctgggattacaggcgcgcaccaccacacccagctaatttttgtgttttagtagagatggggtttcaccacgttggccaggctggtctcgaactccagaccttaagtgatctgtctgcctcggcctcccaaagtgctgggattacaggcgtgagccaccgtgccctgcctgtgctgctcatttttttttttttttttttgagactgattttcattcttgttgcctaggctggagtgcaatggcacagtctcggctcactgcaacctccacctcctgggttcaacgattctcctgcctcaagcctcccaagtagccaggataacaggcacctgacaccacgcccaaccaatttttgtatttttagtagagatggtttcactatgttggccaggttggtcttgaactcctgacctcaaatgatccgcctgccttagcctcccaaagtgctgggattacaggtgtgagccactgcgcctggctaggcctgtgctactcttatatttacttttgttcaattcagcaagtgactgctgagcagctacggtatgctgtagaataatgagagagaaccctagaaagatatggtactgtctgtgcttaagaactcatttgttggccgggcgtggcgactcatgcctgtaatcccagactttgggaggccgaggtgggcggatcacgacatcagtagttcgagtccagtctggccaacatagtgaaaccccgtctctactaaaaatacaagaaattagccgggtgtggtggtgtgcgcctataatcccagctacttggaaggctgaggcaggagaattgcatgaacctgggaggtggaggaggttgcagtgagccgagatcgtgccattgcactccaacctgggtgacagtgcgatactccgtctcaaaacaaacaaacaaaaacacaaaaacaactcgcttgttaaaatggacataggtgtatgaaatgttcctcgaaaatttaattcttatttcagggttttttttttttttttttttttttttttgagacaggatcttgctctgttgcccaggctagagtgcagtggcacaatctcagctcactgcaacctccagctcccgggttcaagcgattctcctgcttcagcctcccaaggtagctaggattacaggtgcgtgccaccaagcctggctaatttttgtatttttagtagggatggggtttcaccatgttggccaggctagtctcgaactcctgacctcaagtgatccacctgcctcggcctcccaaagtgctgggattacgggcgtgagccaacgcgcctggccttttttttttttactttttttgagacagagtcttactccttcacccaggctggagtgcagtggtgcaatctcagctcactgcagcctccacctcctgggttcaagtgattctcgtgcctcagcctcccgagtagctggagttacaggcgtttgccaccatgcctggctaatttttgtatttttagtagagatggggtttcaccaacttgaccaggctggtctcaaactcctgacctcaagcagtccaccccccttggcctctcaaatgctgggattataggctgagccagtgcacccagcctcaggataatgtttaaattgatactaatgggccaccatagggttaagttagtaattgttaaatacttatcagaatgggtgaaattgctgtcgaatttagaatccagttttaacaaaacctacccattcaatttttacttattttcatttgttgcaattgtctttggtttcttgctgttaattctatttttgtctgaaacctggttgaaaaatatacaaagtggacttggtcattttgaactttttgtttgatgtgaatgttcttggggttggttgttgtattgaaaggttgtgaaaagctgatacatcagtttttttttttaataaaaatttaaaagttatttctttttttttttttttttttttttttttgagactctctgttgcccaggctggagtgctgttgcacaatcttggctcactgcaacttctgcctcccaggttcaagtgattctcgcacttcagcctcccaaatagctgggattataagcacccgccaccgtgcctggctaattttttttataattttagtagagatgggggttccaccatgttggccaggctggtctcaaactcctgacttcaagagatccgtccgcctcggcctcccaaagtgctgggattataggcgtcagccactgtgcctggcctaaaaaatatttcttattaaatagagacaaggtctcactttgttacccaggctggtctctaagcacattcgatccttctgcctcagtctctcaaagtgctgggattgcaggcttgagccataatgccctgcctgactctctttctaccaaacatttatgtttcatctctgatgctgttagagagatttcatttgatttgaactatgggatcagaagaattccattagggaggagtgtctggaatctttttcttttgaagacacaactgtcttctccttagattatctgggagatagagtagtcaaagctgttgtggttttttcagagaggatcctgaaatttgttttacctatctctgtttctttgtattgagaaatggtttattaggatattaagtaattaaacatatattgaagaaataaagatgattttctttttgatatctcagattcctattcatatgactgattcttgtaaggaaggactgggaccttaagattttgctgagtgagggaggtggcctgtttttttaaggtcagtttttttcccttttgggattttgttcagtgctttgatacaaaaactgtaatttactttgtagtcaaaactgagatcaaaggaaagtactgttacctgaggcatgaaaatagaagatagcattaagatttagaatttttcttgattttcgtgtctttttaaaataacttgcaattgaaacctgagttttagagcagcagaatgccatttgaataaaggccccagattgtagtggtaactaggatacctcttagataattttaagtgtacgagaaaagcaagaactaaactggattcttcatttatcacgtgtaaagggtagtagttggtgtctttgtactaaggaagtctcctgtttttaaaatgtaggaatatttggagtgaaacattaggaaattgaatagaaaaataggctttgtctttttaaagatggatagaaggaagcagttttttttttttttgagatggctcttcgctcttgttgcccaggctagagtgcaatggcgcaatcttggctcactgcaacctctgtctgcctcctgggttcaagcggttctcctgcctcagcctcccgagtagctgggattacaggcatgcaccaccatgcccggctaattttgtatgtttggtagagacagggttactccatgttggtcaggctggtcttgaactcctgacctcaggtgatctgcctgcctcggcctcccaaagtgctgggattacaggtgtgagccaccgcaccctgccaggaagcagtttttaaaagtgcattacttgagttttatcaagacttatttctgaattctgtgatgaatttgacatcaggaagatttttttttttttttgagatggagtctcgcactgtcacctgggctggagtgcggtgacgtgaccttggctaactgcaacctccgcctcccgggttcaagcaattctcctgcctcagcctctggagtagctgggactacaggcacctgccaccatgcctggctaattttttgtatttttactagagacagggtttcaccatgttgcccaggctggtctcgatctcctgaccttgtgatctgcccgcctcagccccccagagtgctgggattacaggcctgagccaccctgctggaccggacatcaggaagattttaaataatactctctggtgtttatttttaagatattgactcctgaggatgtgcaaagcgaattttatcatgttttttttttttttttttttttttttttgagacaaagtctcgctctgtcaacccaagctggcgtgcagtggcgcattctcggctcactgcaagctctgcctcccgggttcacgccattcttctgcctcagccttctgagtagctgggactacaggtgcccgctgccatgcccggctaattttttgtatttttgtattttttttttttttttagtagagacagggtttcaccgtgttggacaagatggtctctatctcctgaccttgtgatccgcccacctcggcctcccaaagtgctgggattccaggcgtgagccaccacacccggcctttatcttggtttttaagatggaagggcttaagaaaggaatgagaattactgtgtttccgaacttgaggcagcctcaagatgtttctgaaagtcaaggtctctgaagagcacagatggtgaggtttgtagttctaatttaatagatcagaaaggaaatacttaaaattctgtagagaaccttcttgttcttttctaaatttaatctcaggtttaacctcaagaccattagattcttagctgcacgtggtggtgctcacttgtagtcctatcttctcgggaggctgaggcagaaggatcactggagcccaggagtttgaggttacagtgagctatgatggtgccagtacacgttagctattagattctttttttttttttttttttttttgagtctcgctttgtcacctaggctggagtgcagtggcgcaatctcggctcactgccagctccgcctcctgggttcatgctattctcctgcctcagcctcccgagtagctgggactacaggcgcccgccaccacgcccagctaattttttatgtttcttagtagagacggggtttcactgtgttagccaggatggtctcaatctcctgaccttgtgatccgccctcctcggcctcccaaagtgctgggattacaggcgtgagccactgcgtccagcctattagattcttagtattgcaatagacagtgcttccagaaggctcaaatttgtcctttgattaatcacagttggttagtgaaatttgtctttctgttgtcaaatgttatgaattgttttggttcatttttttttttttttaactcaaagtagttctcaaagcagaccctctgcattggattagcgattataagtctcagtcctaatttgatgtaaacaaaaagcttcttttgggagtttttcagggaaaggaaagttgttttaatttgaattcacctaaatggggctgttcttggaaacatatagagaactgtttgtattctataactaagaaatttggaatgagttaaatttcatttggggaaaaatagaaaattgctaaaccacactaatttccaggggagttttttgtttgttttctccatagtgattagtgaaaaggaagaagtcaggagacctggatatgaggcctaactctgcactttattcctgagtgatcttgggcagttgccctttgatgagtcagtttttctcatgtacatgtaggcactcccactcctgggacttcagtgtcctcaccataaaatgggaaggataatacatcattatgtaataaatgtcattgataggagtgtgtcatgcatacaatccctgtggagccagaagaaagcttgagagccactgttggtagtcaacactaaagtcagtcacttgatatagatggtgtttctttgatttaactttttttatgtacttaattttttaaggggtcttgctgtgttgcctaggctggatccaaaaacaaaggctcaagtgatcctcccttcttggccccctgaatagctgcaattataggcaagcgccactgatgaatctgtttttcaattagagtttgaattgagtctattttaggaaggcatctttaactgtgtaatatattgcttaaaaaaaattgctatgctagagaattcctgctttgcttaaataagtggagcacactgacaggcataaggctgttccttttaggtcattattcaccttgtagcacggagattggatcacctatggacatggaaagagtaaaggacttgtctgagtcttttttgggtcattctaggagatcctttcaattatggcaatggccaatggctgatagaactagaaacccaggccgggcatggtggctcacccctgtaatcccagcactttgggtggccgaggcgtgaggatcatttgaggtcaggagtttgagaccagcctggctaacttggtgaaaccccgtctctactaaaaatacagaaattagctgggtgtggtggcatgcgcctgtagtcccagctgtttgggaggttgaggcaggagaatcgcttgaacctgggaggaagaggttgcagcgagccgagatgatgttactgtactccagcctaggcaacagagactctgtctcaaaaaaaaaaaaaactagaaacctcctcaaaaaggcaggacctctggtgactggaattagttgaaaatgtttgtttctgaatcaactgttattttccctggtttgtttggtttttttttttgagatggagtttcgctcttgttgcccaggctggagtacaatggcgcgatctcggctcaccacaacctccgccttccaggttcaagcgattctcctgcctcagcctccctagtagctgggattgtaatcccatgtgccaccatgcctggctaattttgtatttttagtagagatggggtttcttccatgttggtcaggctggtctcgaactcctggcctcaggtgatctgcccgcctcagcctcccagagtgctaagattacaggcattagccaccgcgcctggactttttttttttttttgagatggagtctcactctgtcacccaggctggagtgcagtggtgtgatctcggcttactgcaagctccgtctcccaggttcacgccattctcctgcctcaggctcccaagtagctgggactacaggtgtctgccaccacacccagctaattttttgtatttttagtagagacagggtttcactgtgttagccaggatggtctccatctcctgacctcatgatctgcccgccttggcctcccaaagtgctgggattacaggcgtgagccaccgcgcccggcctattttcccctttgtttcctactagctttctttgctaatgctgtgggcactttggaatggaatggtcacagtaaacccaggggatgcaaagaaaagaaaggttttgtttgttggtttttctacttcttgtgttttctttattttaaattcctttcccccacctggtgatagatgttctgcttatgatttactgtttcgatcaatttttaaagcctcgtatgttaaacgcctggcaaagaaagactgcccttggttttgaaagcagaaataaaaaggtatttcccttggagggaatttatcggcttatttcttgaagtgagtacagacaccattccccacaggaaccacttagcctgaggactgtccatttttttgtggttagaggaaatagctctgttgggcagccagcctatagtggcatcacactggcaggagttgggattttgaagacttttactgtctcatttctgatcaaattctactctcctgcagtggtttttggttttatagaactgttggaaaaatttccctttcctttcatcattcccagagcattgagagaagtattaaattactgcattattgacagagaggttttggtcacccatgtaaggagttcagaaccaggccttcccagtgggctgccatgctggtttgatttttttttttttttgagacagagtctcactctgtcatccaggttggagtgcagtggtgcgttctgggcttactgcaacctccgcctcccgggttcaagcaactcggctgcctgagccttccaagtaactgggattacaggtgtgcacaaccatgccgggctaatttttgtatttttggtagagatgggatttcaccatgttgtccagactggtcttgaactcctgggctcaagccgtcttcctttctccatctcccaaagtgttgggattacaggcatgagccaccatgcctggcctcctaatcttattaataaccttgcttagaagcagttcttccatggattgattggtgaggttggttaccatcttgaacctttcttgtcatctgtaagttgtactcatggtggccatgttattttggcttccattttttggggggagggggtcaaaaaatgggatttccttaaaatggctttgtgggggtagttattgttcttgagttctggttttagtctgatctgtaaaatgaggattacttgcagactataatagaggggcaactatatagtttttgagttttaagtgtttggtgatctgataaatggctgtcagattccagggatgtgactataccagatgttggtaaactgtggcccataagtcagatctggtctacagcctgtttttgtatggcccataaactaagaatgatttttcctttttttttttgagacagagtttcgctctgttgcccaggctagagggcagtagcactttcttggctcactgcacctccacctcccggattcaagcagttctcctgtctgagcctcccgagtagctgggactacaggcacatgtcatcacgcccagctaatttttgcattttcagtagacatggggtttcacatattggtcaggctggtctcgaactcctgacctcaggtgattcacctgccttcctcggcctcccaaagtgctaggattacaggcttgagccactgtgcccggcctgatttttacatttttaagaggttataaaaatcaagaaaatgagaagataagcctcagactgggaaaaaatacttgcagaagacatatctattaaaggactgttatccagaatatacaaagagctcttaaaactcaacaataaaaaagcaaaaacaacccaattaaaaatatgggccagccaggcatggtggctcacacctgtaatcccagctgtgaggctgaagtgagatgattgcttgaggccaggagttggagacaagcctgcacaatacagggagcacccatctttaaatttttttttttttgagacagagtttctctcttgttgcccaggctggagtgcagtggtgcgacatctgctcaccccaacaacctctgcctcccaggttcaagcgattctcctgcctcagcctcccgagtagctgggattacaggcatgtgccaccatgcccagttaattttgtgtttttagtagagacagggtttctccatgttggtcaggctggccttgaactcccaatctcaggtgatccactcactttggcctcccaaagtgctgggattacaggtgtgagccaccgtgcccggcctaaattttttttttttttttttgagacggaatctcgctctgtcatccaggctggagtgcagtggcaccatctcggctcactgcaagctccgcctcctggtttcacgccattctcctgcctcagcctcccgagtagctgggactgcaggcgcccaccaccacaccgctacttttttgtatttttagtagagacggggtttcaccatgttagccaggatggtctcgatctcctgacttcgtgatccacccgcctcggcctcccaaagtgctgggattacaggcatgagccaccgcgcctggcccaaaaattgtttttaaattagctgggcgtaatgacatgcatgcttgtagtcccagctacttgagaggctgaggtgggaggattgctggggctcaggagttctaggctgcagtgagccatgattgcaccactgtgctccagcctgggcaatggagagagtcccagggtctttaaaaaaaaaaaaaaaaaaaaaaaggacacaaggcctaaatagacaccttaccagagaagataaacagatgacaagtaagcatatgaaaagatgttcagcatcataagtcattaggaaattgcaaattaaaacaattgatttaaacagatttaccaagccctggactgtatcacagtggaactaaaagataaggtgttcagtctcttttgattaccatgcccagttctctcattctcctgggcacttgtatctaatggtaaagctgttcttaatgagtttctttttcatttgcaggtatatgaatgacctaaaggtacaaataaagacggagagagaacagtgccaactgggagcagggcaagaatgccaattcctcctcccccgccacccccacctggtcctcctccacctcccacatttcatcaggtaggtagtccttccattaggctatctcaaaacctttgagtaaataggttgatggtcctcacatactttttttttcttttaactccttttggttaaaatttctagattttcctactagtagcattcctattctttaattctgtttttaacattccagattgttattcctagtattaaaggatacttagggcttccttgtacaagacatagtgtataatcaatgacatgtggtataggaaggtggagaataaacaagtccatctttttcagctggttctgattcctgagaggtcctcttaggatcataatggcatgtctggtttccttgtcctggttcactctaaatggagatttggacaggtggcgttggagttggagctagtgttttcccctaaaactatttgctgtataaaagttagtatgttgtttctttggcatttttgagaaaagtggtgaggattcctttttttttttgaaacggaatctcactctgtcgcccaggctggagtgcagtggcacggtctcggctcactgcaacctctgcctcctgggttcaagcgattcttctgcctcagcctcccaagtagctgggattacaggcacgcgccaccacgcctggctaagttttatatttttagtagagatggggtttcaccatgttggccaggctggtcttgaactcctgaccttgtgatcctcctgccttggcctcccaaagtgccgggattacaggtgtgagccaccgcgcccggcttgaggattcttagtggttgtttcttgctaccacttcatcatctcttctattcaaaatcagttcattttaaagccaagtccatcaagttgaacaccttatcaagaaggaaaggagtttttggaatgtattggttcgaagactgaaagattcaataataggaaaaaaagcaatgtgatttttgaaccaagcaggaagctactttagccatacctagattgtgatacctggtgtcacatgagaaggaaggaacctgaggccaggcgcgatggctcacgcctgtaatcccaacactttgggaggctgaggtgggtggattgcttgaggccaggtgtggtgacaagcgcctgtaataccagccactcaggaggctgaagcgggagaattgcttgaacccaggaagcggaggttgcagtgagctgagatcatgccgcactccagcctgggcgacagagcgaggctccatctcaaaaaaaaaaaaaaaaaaggaaaggaggaaaggaacctgtatgcattctatttttgtaaaatttggaagtaaaagtgacttcagagaagaataggccatgggtgtgtgtatgtgtgcacgcataggtgtgtatgtgtgcttatatgtgtatgttaagtgtttaacagttgagaaattgtaccccgaagaggaaaagtgacttgcctatctaatttgtttctgaactaggactagagttcaggtctacccacttctgtttgttttcataacctgtagtttttagacattttgttttaggagtatgtatgaactgccttttagatgaagttttgtgtggaagcccaataaatgaaggagataaaagcagagcttggccgggcacgagtggctcacgcctggaatcccagcactttgggaggccgaggcgggcggatcacctgaggtcgggcgtttgagaccagcctggccaacatggtgaaaccccatctctactataaatacaaaaattagctgggtgtggtagttgagcgccagtaatcccagctgcttgggaggccaaggcaggtgaatcgcttgaaccccagaggcagagattgcacccagcactttgggaggccgaggcgggcagatcacgaggtcaggagattgagaccatcctggccaacatggtgaaaccccatctctattaaaaatacaaaaattagctgtgcatggtggcgcttgcctgtaatcccagctactcgagaggctgaggcaggagaatcgcttgaaccagggagtcagggttgcagtgagccgagatcgcgccactgcactccagcctggatgacagagcgagactctgtctcaaaaaaataaagcagagcttgtatggtgatgttgggggtagaaagaggaggcagtcaatgaaggcttttaggtaggtggtgatacttgagctgagtcttaagccatgagtagagtttagccagaaagagaggagggagggagggcacttgaagttgaggaagtagaatgtggaaagatactgatttggtattaattaattaattaatgagacagagtctcactctgttacccaggctggagtgcagtggttgtgatcataactcactgcagcctctaattcctgggctcaagtgatccgcttgcttcagcctcctaagtagaggggactacatgtgcatgacactgcatatagctaatataaaaaaaaattttttaggccgggtgcagtggctcacacctgtaatcccagcacttgaaactctgtctcaaaaaaaaaaaaaaaaaaaaaaagataagttttttttttttgtaaaggcagagtctcactttgttgcctagactagtcttgaactcctggcttcaagtgatccttttgcctgggcctcccaaagtgctgggattacaggtgtgagccactgtgccggccggcctcgtgctgatttttaggaaagcatatagaggtttagattattgcttgaggggatgtggtagcagatgcagctggagatgtaagctgagggtttagatttttcttctggcgatcatgaggagttcttgaaatatttcccagctactgggggcgctgaggcaggagaatggtgggaacccaggaggtggagcttgcagtgagccgagatcgcaccactgtgctccagcctggatggtagaatctaagactctgtcttaaaaaaaaaaaaaagcaaaaagcaaaaaaagcaatcagagggtggaaaaggcctggggctttgaggcaatcagagcattcacatcttggctgtttgtttattaatgatgtgacgttaactgtcctaaacctttgttttctcatctttggaatgggaataatatagtttactgtataactttatttagaggttaaattgaagtaatagggagacagtagggtatgttagttgagataggatatgagtttttagtgtcactgttggagtttggactcttgttttattgtttactagttgcatgaccttagatagctattcagcttctggcccaccctttccaaatggcgacaatgataataatacctttctcatgggaaggtttagagatttaaatgagctaaggcaaatattgtgcttaccacagtgcctaagtcatagtagggactcactaaatgtttgccttgatggtgatgatacgcattaaatgtctaacatacatagtgtcttaacatgcagactagcacaaagataactaagtattactgcaggcctcccatcagaagcttctgaataagaaggaaatggagttccttcacagaagatagaacaggaggggaaaaactgagaaggataatgcacattgatattgctctttggcatgtatatctaatgaggttagatagacatctcatggaatccagtttgctttaagtcatttatcccaagcttgtgataaagggaactttttttttttttttttttttttttgcaggcacattctcgccctgttgcccaggctgcagtgcagtggtgtgatctcggctcactgcaacctccacctcctgggttcaagcgattctcctgtctcagcctcctgagtagctgggatacagcatgtgccaccatgcctagctaagtttttgtatttttagtagagatggggtttcaccatgttggccaggatggtctggaactcctgacttcaagtgatccacctgccttggcctcccaaagtgttgggattacaggcgtgagccaccgcacccggccgataaagggaactctttagggtgaacttatatttctcttatcctccaggcaaacacagagcagcccaagctgagtagagatgagcagcggggtcgaggcgccctcttacaggacatttgcaaagggaccaagctgaagaaggtgaccaacattaatgatcggagtgctcccatcctcgagagtgagtccgagcttcatttcctagtgaactggcaggatcccaggagtgacttggagacttggctgggttcttatttttattgggccttgagtgggagagttttgtcctgggatgtgctttggctctcttcttattcattcttctgaaccttagaagtttcttcttgactcttggagagcatctcaggattaaggttaccatctcaccgggcatggtggctcatgcctgtaagcccagcactttgggaggtcaaggtggaaagattgcatgagcctagaagttcaaggctgcagtgagctgtgatcatgtcactgcgccactgcactccagcctgggcaacagagcaagaccctgtctctcaaaaaggtaaaaaaaaaaaaaaaaaaaaaggctgccatctcttactgtaactaatgctcatcagggtacatccttgactgtcctttgaggacactgtcacattcctggaaacctcttgactgaaaccaaggttgattttatgattgctacaagtgtccattcctgtaggcctctggagagtgctcacgtattggtccctgattctttagccttctatctgtcatctgagatgtggagagaagagcccagataactatgttgaacatttctttttttttttttaaagactgagttttgctcttgttgcccaggctggagtgcagtggcacggtttcagctcacttactgcaacctccgcctcccaggttcaggtggttcttatgcctcagcctgccaagtagttgggattataggcacgtgccaccacgcctggctaattttttgtatttttagtagagacggggtttcaccatgttggccaggctggtcttgacctcctgacctcaggtgatccacctgctcagcctctcaaagtgctgggattacaggcatgagccactgtgcctggccccccaaacatttatttaacccccttatccctttgccctgaataaaggaagatcggccacttgttgttgttgttttttttttttggttttttttgttttttttttttggagacagaatctcactctgtcacccaggctggagtgcagtggcgcgatcttggctcactgcaagctccaccttctgggttcatgccattctcctgcctcagcctcccgagtagctgggactacaggcacctgccaccgcacccggctaattttttgtatttttagtagagatggggtttcactgtggtctccatctcctgacctcatgatccgcccgcctccgcctccgcctcccaaagtgctgggattacaggcgtgagccaccacgcctggcttcactcgttctttctctttcatcacaacagagtttcatccctacacaaagctgtggagcagagaggcctagctttcctttcttttcttttcttttctctttttttttttttttttgaaacagggtcttgctctgtctgttgctcaggctggagtgcagtggtacgatcacagttcactgcagcctcgacctcccaggctcaatcgagcctcccatctcagcctcccgagtagctgggactatataggcatgcatcaccatgcctgggtaatttttgaaattttttgtagagtcaggtcctactatattgcctaggctgctctcgaactcctgagcttaagtgatcctcccatcttggcctcccaaaatgctgggattagcagcatgagccactgtaccaggcctgcttttttaaatagaagggcaaaaacaagactggtttgtttgcaagcgatagcccagatagaggagtggtttcccctcatgatttacttggtcaccagctgagagcatgtgaaatgaaaaccctactggtatgctttccagagccgaaaggaagcagtggtggctatggctctggaggagctgccctgcagcccaagggaggtctcttccaaggaggagtgctgaagcttcgacctgtgggagccaaggatggttcaggtatctgatgagtactttcccagggtatttccctggtgtgttaatttctgatgtcccaagtgggccatctcaggttgaggagtatggtagaggtggggggaagaaagacttgggagtaggggaggagttatagaatagaatacagcaaaagctgagggattaaatgaaagtggatgcaacttggataaagaaaatgtggcatatataccctagaatactattcagccttaggcaagaaggaaacttctgtcatttctgataatatggatgaacttggaggacattatactaagtgaaataagccaggcacaaaaacacaaatactgcatgatctcatttatatgtgggatctgaaacagttgaactcactcgtagaagtagagagtgaaatgttggttactagaggctgggggcagtaggcgttgggattgggaaaggggagatgttggtcaaagggtacaaagtttcagttagacaggaggggtaagttttagtgatctattgcagcagtccccagtttttttggcaccagggactggtttcatggaagacaatttttccatagatggtgggcgggggatggtttcaggatgaaactgttccaccttagatcatcaggcattagttagagtctcataaggggcatgcaacctagatccctcacatgcacggttcacaatggggttcgccctcctatgagaatctaatgctgctgctggtctgacagtaggcgttgctcaggcagtaatgcttgctcgctcaccttctgtgtgccctgttcctaacaggccactgacctgtacaggtgcatggccccaggggttggcgaccccttattatacttaatgtatatttcaaaattgctaaaagagtatattttattttattttattttatttattcgtcccccccccccccgcaaatggagtcttgctctgtcgcccaggctggagtgcagtggtgccatcttggctcactgcaacttccgcctcctgggttcaagccattctcctgcctcagcctcccaagtagctgggattacaggcacaggccaccacacctggctaatttttgtagttttagtagagacggggtttcaccatgttggccaggctggtctcaaacttctgacctcaagtgatctgtccaccttggcctcccaaagtgctgggattacaggcatgagccactgcgcctgttgtagagtagattttaagtgttttcaccattaaaaaaaatatgtgaggtgatggatatgttagtttgatttaatcattccacaacgtatacatataacgagacattgtaccccataaatacataaaattattacttgtcaaaaataaagtaacatttaaaataaataacagtgtatcctgagcctgaaaccgtattaaaacccagaactaggccggacgtggtggctcacgcctgtaatcccatcactttgggaagccgaggtgggcagatcacctgaggttgggatttcgagaccagcctgtccaacgtggtgaaaccccatctctactaaaaatacaaaaatcagccaggtgtggtggcgcacacctgtaatcccagctactcgggaggctgaggcaggagaatcacttgaacccagaggttgcagtgagctgagattgcaccattgcactccagcctaggcaacaacagcgaaacttcgtctcaaaaaaaaaaaaaaaaaaaaaaaaaaagaaaaacaaaaaacccagaattattcaattcctttccctgctgccatgcaggttgcactaaggagccgagtgaagtagggatactgaccaatatctgtccagctctgttgaccctgtgttgtctatgtatttgtagagaacctagctggtaagccagccctgcaaatccccagttctcgagctgctgccccaaggcctccagtatctgccgccagcgggcgtcctcaggatgatacagacagcagccgggcctcactcccagaactgccccggatgcagagaccctctttaccggacctctctcggcctaataccaccagcagtacgggcatgaagcacagctcctctgcccctcccccaccacccccagggcggcgtgccaacgcaccccccacacctctgcctatgcacagcagcaaagcccccgcctacaacagagagaaacccttgccaccgacgcctggacaaaggcttcaccctggtcgagagggacctcctgctccacccccagtcaaaccacctccttcccctgtgaatatcagaacaggaccaagtggccagtctctggctcctcctcctccgccttaccgccagcctcctggggtccccaatggaccctctagccccactaatgagtcagcccctgagctgccacagagacacaattctttgcataggaagacaccagggcctgtcagaggcctagcacctcctccacccacctcggcctccccatctttactgagtaataggccacctcccccagcccgagaccctcccagtcggggagcaggtaagtgcttggaagcacctttttccctatcatgctgtgagttgattttatctttccccagagcactccttgaagacagtaattcgtttattcactcagtgggtttattgagtacctttttatgtgtcaggtctgttggtagggaaatagcaataaatagaaaagacaaaaaaatttgacagtcaaactagtaaaatatataaatacatagtatgcagtatgctttagagaattacaaagcagaggagaggaataagatatactggggcggaggtcgggatgatgatatctttaattggaggagtggggagagagtcaggacagtccttactgatacggtgaaaatttgacaaagaccttaagaaagtgacgagtaagcttagtagttatctaggagaacagctgttgcaggcagtgggaacaacaaatgcagaggccataaggcagaagtattcttgaaacattttggggacagcaagggggccattgtggcaagactacaaagagtgaggggagggaagagtggtaggacttggaggttggaaagctggagctgcaggggagagcgcactgcaggattttgcaaagaccttggatttaactgtgtgagatgggaagccactggagggttttaaacagagaagtagtatgatttgattcaccttttaaaaagatcattaactcctatgttgagaacagaccgcaggaggacaaaggtgacaaaaggagaccagttactgggctgttgcagtaaacggccagatggttaggactactgtgaatttgtgggaagataggtgttcagtttgagacaagtttgagatgcctgttaggtaatcaagaagagacaatgaattggtaattggctatcagactccaaagttgaggggagaggtttcggctagagagatacatttgaatggtgttgaaaaccacatgctggatgaagtcacctaaggagtgaatatagataagaagaggcctaggaggctgaggcaggagaatcgcttgaactcaggaggcagaggttgcagtgagccgagatcacgccactgcactccagcctgggcgacagagtgacagtccatctcaaaaaaaaaaaaaaaaaaaatgagggctgagccctcgccctcctacattagaggcaaaagagatgaagaatacccagcagaggaaacagaaaagcttctagtgaggatggaaggagaaaaaccaagaatgtgatggaaaaactccaaggtagagtaagtggtcagctgtgcccagtgctgcagatgggtcaggtaagttaaagaccaagaactggcattggtcttagtatcatgggacccttttgagtagtttcagtggagtggtggagggtgaaagtgaaagcttaattggagtgggttcaagaatgcaggaataggaggagagaaattggagatagcaatatagaaatctcttaaagagttcgctgtaaagtccaggagagaggggtgaagataagtgaagtgattgttggacgaagatgtggggttgagagttgtttttttcccatcccaagatgggagacctatttgtatgctgatggaatgagtagcatgaaacttaggagagagggaaaaaattgaatcagaagagagggaacagattgcctgaataatgacctggaggaggccagagaaaagagaatgtgatcgatagataaaaagggttggccttagataggaacatagttcttccatagtaacaagaggggaggcagagcatataggcttagaagcaagtgggtaggtgggtgtagtggtagaagcatgtggaaagtttattctaatttgcttctgttttctcagtgaaatggaaagcaagagcatcagctgtgattgaggcgagggaaggagaaggagagttgaggagagagaagaggcatgaaatggtcatctggagcgtgggagtgtgggtggactagggaagtgtgctcagataggcaaccacgcgaagggcccacttgagattatgggccatacatttcatgtgagattaattagtctcatgtgttcagttgtgatttgcaggtacagaaaaagagtagagctgtgtttaaccagcgttagcatgttttaggcatgtgcgactctaagggagagtggggcaggaagggaagggtgtatgtgagggagtgattgcaataatggagcctaagctgggtgaggagggaatttaggaaccctggaaaaagaagaggttgtgtaatctcgttataattagcataactgaaattttagagtgagggagaccgtgacagctctctggggccttattggacatgggaattttggctcccatatcgttgtatcattagactttgagacataccctccacaaacagcttcttggcctttatttatttatttgtttgtttgtgttttgagacagagccttgctctttcgcccaggctggagtgcagtggtgcaatctctgctcattgcaacctcttcctcccaggttcaagtgattgttgtgtctcagcctcctgactagctggaattacaggcatgtgccaccatatctggctaatttttgtatttttagtagaaacgggttttcgccgtgttggccaggctggtctcaaactcctgacctcaagtgagccactgcgcccagcccttagcttttattttaaagtcagtttctacaggtatagaacattgattaaggagttatgtcatggagtctgggcatgatggctcacgccttaatcccagcactttggaaggttgaggccagcagatcatttaagcccaggagttcgagaccagcctgggcaacatggcaaaaccctgtctctacaaaaaataattttaaaaaattagcctggcatggcggtgcatgcctgtagtcccagctacttgagtggctgaggtgggaagaccacttgagcctgggaggtggaggctgcagtgagctgtattagtgccactgcacttcagcctgggcaacacagcaagacgttgtcccaaaaaaagggtaaaggttatatcattaagtagcaaggcattaaaagtccattaacctgtgtgcagcttctttgttcagtacatacagatttgtactctagcagctggccatctaacatagggcagccaaacagtggcctactgcattcctgatcccatatctccctagctttagccataatgaggtagtgctaaggtggcccttgattctataaagttcaggtttgactttttttttaacttagggattttacaaaagactctttgtctgagcaaagctcatatctttctgacctcatccaggaatagaagaagagaaaaatgcaatttccgtgggttgagctgagcacttttaaatgtctgcaggctttcttgcttcccacttttccattctttctctgtggtagctaggactacaggagtgttgccaccatgtctggctcattaaaatttttttttatttttattttttaagatgaggtctgtgttgcccaggctggactcaaactcttgggctcaagccatcctcccaccttggcctcccgaagccctgggattacagatgtgagcaattgtacctggctagagcagcaattcttaagagtgataaaccagaaaaaaattgagatattttagtcagagatcatttgagtattgcctcgatttgttgtgtgacattggacagatcactgattctcttttctcaccgattctcttttctcacctgtaaaatgtacatttgaaaagtacagtgggggtcagggacacaggctcacacttgtaatcctagtgctttgggaggctgaggcaggaggatcgcttgagacggagttcaagaccagcctgggcaacatggtgaaaccccattactacaaaaaataaaaaaactaggccgggtgcagtggctcacgcctgtaatcctagcaatttgggaggctgagacaggcagatcacctgaggtcaggagttcaagaccagcctggccaacatggtgaaaccccatctctctactaaaatacaaaaattagccaggcatgatggcgggtgcctgtaatcccagctactcgagaggctgagacgggagaatcgcttgaacccgggagattgtggttgcagtgagctaagattgcaccactgcactccagcatgggtgactgagcgagactctgtctcaaaaaataaataaataaataaataaaaataaatttaagaaacctagccaggcgtggtagcgtgtgcctgtggtcccagctacttgggaggctaggatgggaggatcacttgagcccaggaggcagaggctgcagagagctgagatcacgccactgcactccagcctaggcagcagagcaagaccctgcctcaaaacccgcccccccaaaacccaaaaactagcattattggttcatagagtttgtttcaagaattttttctttgcagagtaaaacactgtcttttttttttttttttttttttgagatggagtcttgctctgtcgcccaggctggagtgcagtggcgcgatctcggctcactgcaagctccacctcccaggttcacgccattctcctgcctcagcctcccgagtagctgggactgcaggcacccgctaccatacccgactaatttttttgtatctttagtagagatggggtttcaccatgttagccaggatggtctctatctcctgaccttgtgatccgcctgccttggcctcccaaagtgctgggattataggcatgagccactgcacccgccaacactgtccatttttaagggaatttgagaaaaatagaaaccatcatacttttctcaaaattagggttaatcttggattacaaaagcctgtctcccatcccaggacttcttttggaaattgttttttagggactggagttctggctctgtcacttgaaacagtcttaaaactggatctggggccgggtgcggtggctcatgcctgtaatcccagcactttgggaggctgaggcgggcagatcatgaggtcaggagattgagaccatcctggctaacacggtgaaaccctgtctctctactaaaaatacaaaaatgagccgggcgtggtggcgggtgcctgtagtcccagctactggggaggctgaggcaggagagtggcatgaacccgggaggcggagcttgcagtaagccgagatcgtgccactgtactcaagcctgggggacagagcgagactccgtctcaaaaaaaaaaaaaaaaaagaaaaataactggatctgacaaagagcccagaagcttattggagacagcagaacctggctgggatgagggagggagctggagaagccaaacagatcactcttaccctgctctattttgccattccaggtcgtctcatcgctgtcacctgcctggtgtctagctggtgtcggtgtccttgtgaacctggctaaccctgtttaccttgctgccctggcctaggagtagatacaaattctcagggccttgaggaatctgggttttagggaatatttttgagggcttaaagaagcttctattcttaaagagctttagtttgagtagatttggaatcaaaacaaggctcagagatctgctgggagttacaagatttctctttaattattgcatctagtgtcccctgtttctactgaacaaagcttggaaacagtgaggaagagttgacattctgagtgtgtcttacgggaagcaaaaacatttattgggcttattgtgccagattgtgtgtgtgtgtgtgtgtatgttattctattactgtgttacatgcttaactatagtcactacagcaattctgatagtaatcaggaggaataataagatactcttttctttgagacagtcttgctgtgtcaccaggctggagtgcagtggcgcgatgttggcttattgcagcctccatctcccaggttcaagctcctcccacctcaggctccagaatatctgggattgcaggcgtgtgccaccacgcttggctaatttttgtacttttttaaaatttgaggtgaggtttcatcatgttgcccaggctgatctcgaactcctggcatcaagcaatctgcctgcctcagcctcccagagtgttgggattacagatgtgagccactatgcctagccaagataccgttttactactaaaaacagttttgtctgttaagctgagtagtctcttcacatactatttaggtcacaactatttattgggccacgtgctgtggcacatgcctataatcccagccctttgctgaggcgggagcattgcttgagcccaggagtttgaagctgcactgagctatgattccaccactgcgctttaacctgggtgacagagtgagaccctgtctcttaaaaaaaaaaaaaaattgaacatggcctagataccaaaagatgcacttccaagccactggattgtaaatctggttgggaagatactatgcagaatactgggagttacgaaaagcagtgtgggagagtagaaagagcagacatgtgccttgcctatttttatttgatctgtgaccttaaacaaataacctgagtcccagttttctcatttgtgaaatggggataatattacatacttcgcatgtgtggctataagactttttaaagatttaatacaccgaaaatgcctggaacataatagatacccaataaatggtagctgctattattgttagttaatacagagcataggagtaagacaaacacgttagaatctattatattccagtcatattgccatttcttgacacatgcttttgacgttaccttctacttggtggcaaattttcatcttttaagagtgaatttgatttttggaatcaccaaaaagcagattcagacataggtatgaacattttcttttttttttttttgaggcagagttttgttcttgttgcccaggctggagtgcaatggcacgatcttggatcaccgcaacctccgcctcttgggttcaagcaattctcctgcctcagccttccgagtagctgggattacaggcatgcaccaccacatctggctaatttttgtattttaatagagactgggtttctccatgttgatcaggctggtctcgaactcccgacctcaggtgatcctcccgcctcggcctcccaaagtgctgggattacaggcgtgagccaccgtgcctggcataggtatgaatattttcattggtgatggtggtggggcgacctcagaaatgaaatgtgaccatcatataatagtgtttacagctctgactgataaacttgctttggaggcaattccaaaagaggtgtttgcagtgtttgagcaatgagactgttactggacatatgtaacttcccacaatgaatctgctgtatatattttgaaaatcgctcattgatattagagtaagtgacatagcctgtatatgctgtgggagagcagaggtggagggactcagaagaaaatggattgctttgggaaagccttgagaagatgggacttggattgaaccttgaagggtagggaggatttggtagtaagggaaggggggatatcagaatattgtgaggggagtcacaagagcaaagcatataatttggtttattcagcaaacattgattgagcacctgctgtgtgctgtacatttggctgaacttgggaacccagaaggaggaactgctctgacatcaaggggtacacagtatactggggaaagagcacacagaataaataattataatagtctattcaagtggtaggtatgcacaagctgcagtggaagtgcagaggagggctcctaacctagcctagcaataagaagggaagaggagaagccaagctcaagctgattggtgtggtaggttactatgtaagcaaaggctttgagactttatttttttacttatttatgtatttgagatggagtctctctctgttgcccaggctggagtgcagtggcacaatctgggctcactgcaacctccacctcccaggttcaagtgattcttgtgcctcagcctcctgaggagctgggactacaggcacacgccaccacaccgggctaattttttgtatttttagtagagatggagtttcatcatgttgcccaggctggtctccaactgctgagctcaggcaatcctcccgcctcggcctcccaaagtgctaggattatagacgtgagccatcacacccagccacagtttgagactttatgatttaggcagtgcaaagcctttgaaaaaactggatcaagtttttagggaggttggtgagttggtgttatgcaaaatgaatttggaggggtaagagacaaagcaaggagaacattcggaaggcttttgcagtagagaacaggctaaatataaggaagacctgaattagaattgtggaggaaggcatggaaaagcaggaaaaaaatcaagaacagatagggttctgactgactggtaggaaatgtaaaaaggccatacatttattctgaatgttggtatctggaagaatggtgatgctgttcaagtaataaggacaaaggggaaccaggcactgtgagcctctgtggggtgtgttactcttttagctcatgtgtttcaagtcattctaccccttgccgtctccacatccaaacctaactactttggattttaattgcagctcctccacccccaccacctgtgatccgaaatggtgccagggatgctccccctcccccaccaccataccgaatgcatgggtcagaacccccgagccgaggaaagcccccacctccaccctcaaggacgccagctgggccaccccctcctcctccaccgcccctgaggaatggccacagagattctatcaccactgtccggtctttcttgggtgagtagctagctatctgtagtctcatggttcctgcggtgacttcacccactccagtgccatggctgctagatggccaccatagagtgggaatggccacatgggatcctttgttcacaatagttctcctgctgacttcatcctcagaggtatgggctgtgttcattgacttccttatcttgatatgaattctaagcatggatgctttggagtagattgaagtaaaatcagcaagtgttgtgctaactctaaatccactccaaagatcactttttgtagctagcttttaggtcagagactctgtatcttctttaggattattcagacaggacttatgtattctcctaggaaggagtgttcctttctagctcttcaaaaacaaaacacttgattgttcttggaattattattttttaattattttttatagagactgggtctctgttgcccaggccgctgtcaaactcctggtctcaagcagtcctccaaccttggcctcccaaagtgctgggattacacatgtgagccatcacatccagcctttccttggaattcttgaaaaaaaaaaaaaaaaaaaaaaaaaaaaaaagaaaagtcccatggcacattgcctggaaagaaaaaagaagaaagaatgacaaaaaatattaaagaaaaaaggattgggcgtggtggctcatgcctgtaatcccagcactttgggaggccaaggtgggaggattgcttttagcccaggaactcaagaccagcctgggcaacatggtggaacttcatctctctaaaaaatacaaaaattagctgggtgtggtggcacacgcctgtgtttccagctactcaggaggattgcctaagtccagggaggttgaggctgcagcaaaccattgatcacatcactgcaccccagcctgggcgacagagagagaatctgtctcaaaaaaaaaaaaaaaaaaaaaaagtcggctgggtgcagtggctcacgcctgtaatcgcagtactttgggaggccgaggcaggcggatcacctgaggtcaggagtttgagaccagcctggctaacatagtgaaaccccatctctactaaaaatataaaaaattaactgggcatgatggcacgcagccataatcccagctactcagaaggctgaggcaggagaatctcttgaacccaggaggtggaggttgcagtgagccaagattgtgccactgcactccagcctgggtgacagagcaagactccgtctcaaaaaaaaaaaaaaaaaaaaacaaaacccaaaacattacacacattaatccaaagccactaactagcagtgttattttgaggaagtcacgttacttctctgggcctcacttcccttatttgtaaaattaggttgactagatcagaagtgtatcagattaacttttccaagattataaatgttgggggggctctacctaagagattctgattccttggttctgggatgtaaccctaagtaaaggttgtccataggctattgttagacccgtctgttgaggacccttggaagaaatctctgaaaggtcccttgcaaccctaacactctagattttttttttttgagatagcgtcttgctttgtcatccaagctggagtgcagtagcgcaatcacggctcaccgcagtctcgacctcccaggctcaagcaatcctcccatccttcagccttccaagtagctgggaccacaggtgtgcaccaccatgcctggctaattttgtattttttttgtagagatgaggttttgccatgttgcccagactggtctcaaactcctgggctcaagctacccacccaccttggcctcccaaagtgctgggattacaggcatgagccaccatgcccagcttctagattctttaatggttgctgtccttacctacccactgtcctccatgttctagtctattcctattaggtatgccagggtttttgctttaaagatatatccttattgtagaaacctttgggatgtgatcaagccgcacttacagaaaatttgagctttctgatggaggggctgtagaaagtagtagtagaagccatgagatggctgtcccaactatgtaagtgaaggtaacatggactgaaagggaatcatctggtcaaatctctcactagtcatagacagatattcccattttaaattaattcctaccaatttctggatttagatcagttgttttcccgtggtgacagtctgtaagatgttattaaaacccagaattggctgggcctggtggcttacgccagtaatcccagcgctttgggaggccgaggcaggtggatcacctgaggtcaggagttcaagaccagcctggccaacatggtgaaaccctatctctactaaaaatacaaaaattagccaggtgtggtggtgcctgcctgtaatctcagggacgctggggcaggagaatcgcttgaacttgggaggtggaggttgcagtgagccaagatcatgccaccgcaccccagtctgggcaacagagtgagactccgtctcaaaaaaaaaaaaaaaaaaaaaaagaattatatttctttctgctaccatgcaaacaactgagctcctttcctgttctgtgcctgacttggtggaaaggtttaaagaatcagctcaggctaggcgtggttcacacctgtaatcccagcactttgggaggccaggtggggagattgcctgagcacaggagtttgagactagcctggccaagatggtgaaaccccgtctctactaaaaatacagaaaactagccgggtgaggtggtgggcaccactgcactccagcctgggtgacagagcgagactgtcaaaaaataaataaataaagaatgggctcaaagacgcactacttagtacagagaggttttgaatacatgctctgtgcatgcaaggcacgtggggtgatgctgctgctgttctcagggtggttggtttggtggggcagtaggtcctcacagtacctcagaatgcctgagagattagtaagtggggagggtcgaagcgatcagaggcctgtgggagcacaagcaaggatgataggaattaatgttctattcttttcgcagatgattttgagtcaaagtattccttccatccagtagaagactttcctgctccagaagaatataaacactttcagaggatatatcccagcaaaacaaaccgaggtgagaataataataagaaggtttttccataattgcatagaatgtagaatctgtgcattttcttaggttaaaatttgcttctcgctgggcacagtggctcatacctataatcccagcactttgggaggccaaggtgggtggatcacgaggtcaggaattcgagaccagcctgaccaacataatgaaaccctgtctctactaaaaatacaaaattaggctgggcgcggtggcttatgcctataatcccagcattttgggaggctgaggtgggcggatcatgaggtcgggagatcaagaccatcctagctaacacggtgaaaccccgtctctactaaaaatacaaaagattagctgggcgtggtggcacacacctgtagtcccagctactcgggaggctgaggcaggagaactgtttaaacccaggaggcggaggttgcagtgagccaagatcacgctactgtactccagcctgggtgacagagggagactccgtctcaaaaaaaaagaaaaaaaattgcttctcatcatcttcgttgtcctttttttttttttttttttgagatagggtctccctatcgtcacccaggctggagtgcagtggtgccatctcggctcaccccaaacctctgcctcccaggttcaagtgattctcctgcttaagcctcccaagtatctaggattataggcgtgtgccaccatgccggattatttttgtaattttagtagagactgggttttgcctggttggccaggctggtctgaaactcctgacctcaggtgatccgcccgcctcggcctcccaaagtgctgggattacaggcgtgagccaccttgcctggccactcatcttcattttcttaggcaaaacaataataacacgtagtccccagattttaaaggttagcttaaagagcctgtctctcattttaggaatgtgtgggttgttcagattctggtgggtgacctgtatgtgtgtggtctttattttgttttttttcagctgcccgtggagccccacctctgccacccattctcaggtgaagcctggcttggtcccgttcctcaggaaaaggatggaccttctcttcttctcagatggtcccttccattcccctgaaacctgcatgagagctcctaacatgtttctccaatgcaatcaagccctagactccaaatgtcctcccagctcacctccatctatgcatctcatctctggatttggtgatcagactctatattgacagtaggatctcaaaccctgcatccatccttcctccagcaagccctgctagccacatgaggaacaagtttccgtgtcttctgccttcctcttggggaaaggtgccttgttgtgatgaattaactcactgttagggcagggtggagaatggtactccttccttctcctgtccactgtgggggaagcttggcaggtatattatatttcatcatttaggaggctggcatgaccaggacttatgggtgggaggggagcatttttagtgaagcaagaaaggagtttgccaagaagtgatctgttttaaaggtcatatttggagaaagggcaaggaattgggtctgctttatttttgggggtattttgtttttgttctcacctgctgcccccccaccccaccaccccagggataaattggatataaacactaaatactaatcagttgaacttaacatttaataaaaagaaagggtgaaataaactgaagaccattttagaactagtcagttctctgcagcaaagggaacaggagccatttgaaccctctgggacccctcaccccactgcttcagggtgctaggctgagggatgtttttcctcccccttaccgcccatgcccttgaaagaaaagtcactttttgtggagggcatcattcattcctgattcacaaaccccaaaaacctctggtgggagataggaagatagggcgtgggcctgggccttaacctcaatcttgtgtctgcctcagtcttttctgactggccctgaagttgtcagtggctctttctgtccttcagcccctggaaggtgctccaggataacaaagaagggcaggttgaagcccctcatggaaggagctggctttgtggggctgcaaaggacttttaagtcctgcctgtactgaagttcacagcccacctgactgagcagactcttcctgttcctttctctaccacccttgccttcccaggactgcacggtttaacacagcagagtacagaagggtgaagaagtgagcagaggcttatgaagatattcagatactcttctatgccaggaagcacaaagactttgttgagatttgcctcagttcagtagatcttccttggcagccagccataggttgtttctttgtcttccgggtcctaaagagcacagagaaaatggaggtccccagtctaggtaggaagctgattggatgaggacttctttttttccgacagcaggatggggctcttgggctccacacaccagatgctttggttttctacaactgttgctatgtgtagagggtgctcagagcgtggcatgagagcaaggagaccatggctactctttgaaatggatggggaaaattagcttaaaaatttaatcacgagattgcgccactgcactccagcctgggcgacagagccagactccgtctcaaaaaaaaaaaaaaaaaaaaaatttaatcacacacatcacaggcttaaactgtcttagagacctttccagttgattggatcacaggctagggatctgtgcatggtgccaggtgaaacccaagtctccccagtgctaggtgagggagggctcaacgggggtaatgtgtatggggtctgctgtcctttgccatcccctggaccatattaactctgggacagaccatgattaggtctgtcaccaaacttttcctaatcattttttatgtatcattcttctttctaatctgttagcagttatctcccagaagtatccctagcatcctgaagcaaacagaactgccgggcgctgtggcttatgcctgtaatctcagcaatttgggaggccgaggcgggcggatcacctgaggtcagaagttcgagaccagcctgtccaacatggtgaaaccccgtctccactaaaaacacaaaaattatctgggcgtggtggcatgtgcctgtagtcccagctactggggaggctgaggcaggagaatcgcttgaatccaggaggtggaggttgcagtgagtggagatggcgccactgcgctccagcccgggtgacagagtgaaactccatctcagaaaacaaacaaaccaaacaactgagagagggcatgctagtggagggaaaaggagagagtacaagagttgatactgcatcagagttccagggcagatactgacaagtgactgaactttgactgtgaagtcttcccatttatttttgaaatgggagtcgatgccttttgtacgttatcaaagtgtttttttttttttcctcctttactcagacatagagcatcaaaatatcacgagtaaagccaaaccccagcttttcactggggctgatatcttcctccccatggcccactgccccctcatattccccagcacttggactgtgtcacatgggtattgattgtatacttgttgtcttggcctcatgcaaaaaggcctgggtctagatctagtcagatgagttttttttagagcatgttgatgatacaacacctgtttaaatgtctgccttatatgttatttggtcccactgttaataatagatttattactatgtatatttactattgaagatgggaatgtgatctgcatagttatcagtctattttgtatgttgtaaaaagcttctaatttaggtttaaggtgggctggctacaagagcactaaaactcctcaccttttaaactgctctttttatctgcttgtgggaatgtcgtctctttcgtggaagattgggtggtctcatgttgaggctgttgcccagtcccattaactcccttgtccccccacagaaggaagagacattgcccagctaagcatcaggaagctgtgttaaaagcccttctatgggtttggttttgtgatgtttttccctaatgggaaaaacgttatagttgtttcttactgccctgtctgggaagcagggcaaacctccaggtttttaaatgagctagatgcccctcttcctcttctctggtcactgaacctggaccaaagcactttgatattccaggtgtgattttctctgtcatggggatttgctccactgcagagccccatcattttcacagcgtaggccaacagagtgagaacctagggctaccctagctgatggatgtgaggctgctgtctacaggagctcatcccagccctgttaactggcagtggcaaggatactcgtcatcggccattgcactggggaactccctcaccccatggcttcccaacttgaaacccagatttacctccagggagaggtgagaaaaaaattgtaaatagacttgctaaagagcaactcagggttggggtgtgttttaattctcctgatcacttgaaataatctgtaggctgagtgcttatgggggtgggggagaagggtgactccagggtccttccattttgtgaagctctgggggtggagtgtgggcatctgaggccctatgatggcactacattgagctgtctgcccttccggaaacccaacctgcaatcaactgcaaatcaaattcttcacattccagctacagtctttctttccccattgaatctcagtccctggccatgtggtcaaggtggctttctgttaagctaccctaatttcgggaatgggaggggagagaggagggccattacaactctgccttcaagactcatctcttaaaaacaaaacgaaacaaaactacaaccaccatcaaaaccacacgcaaaaaaaaaaaaaaaaaaaaaaaggataactttaaccgaaggaagggtttggttccattcaactccacattcattgtgcctttacttgcattagatttctgtgctttcttcctttccctctttgaagcaattaaaatcttccttgataactgctgtttctttctactcttgtttctggcaatttagtgggttccttctctagtggtcttaaatctcattccactggtggcaagatggggcctagccttcttttcacatgtctaatcttttcctttctcatggtgccctccatggaagtcacagtcaacactgaataaatgactagaatgacacgtgtgcgtgcgcacgcgtgtgcgtgtgtgtgttcatctgtctgcatgtggatcaatttcttttagaaaataatttattgtatgatttattttggagttatattctgattacagtgctccctctcccaaatagcattgattttttcccccctctaaaatgtataatctggtctcaggttggattctttggtacatttctctcttctggatgccatgcagcttaattaaaaccttgcttaaaaacaaaaagtgaaaattgtgtactcttgtctggaataccgcctcaggtggtggcacagagaggggagaaaacctttgcctcataatttgggtaagtgtagtggtttgattccaggtcccttgaaaaagtagatctactgaattgggcagactcatctatagctttctgagggtcttctctcctcctctccagctgtattttgaaaattacagttctagttggctgggcgcgatggctcatgtctgtaatcccagcactttgggaggccaaggcgggtggatcatttgaggtcaggagttcaagaccagcttggccaacatggtgaaaccccgtctctactgaaaatacaaaaattaaccggtgtcatggcgcatgcctgtagtcccagctactcgggaggccgaggcaggaaaatcacttgaacccaggaggcggaggttgcactgagctgagatcatgccactgcactaaaaaaaaaaaaaaaaaaaaaaaaaaaaaaaaaaaaaaattctagagttctagttacccttcctgggagattctgatggtccttattttattattattattatttttttttgagacaggatgttgctgtcatccaggctggagtgcagtggtgtgatcatagctcaccgcagcctccaactctcaagctcaagtgatcctcccacctcagcctcccgtgtagctgggaccacaggtgtgtaccactatgcctggctaattttgaaaatttttttgtaaagacagggtctccctatgttgcccagactggtctcaaattcctgggcttaagtgattgtcccacctcagcttctcaaagtgctgggattacaggcatgagccaccgcacccagccagtccttattttatatttccacctaactcccctttgcccacgatttcagggaacctaggaggcttcctggccttgtgaccttttccttgaatctcttataattctttctacctgtgttgcatggcagattctcagattgaggctaaagaaaagaagggtggggacaaagcatacagaatgtgtgtatctgtttttatgtgggtgttggctgtttttcgtcactgctttttaagctgaatcttagctggttttcttgaactttgactttaggtgtaaaaattcaaccagacattctctccttactgtggtcagctgacatcataaccactaaggcttaatgagcttaacttgcactttcatcactagcaaaggtcttgaagttatttctcttactgattcataatgggtgtgtgtatgaatcactctcacataatttagatataaaaacctatgaggatgagggagggaggggaagaaaaaaaaggactcctttcattttcatccgtacttcccagatgggctgaatctccgattatttgacccatcattgttattaatatggttaataaactacctatttattgattgaattgttcctcctgacttgaaatagcctgcaaatggagcttgcctaaatgaccttcgacttcctaaccctataattcattctgtcttcttgtgatggtattgctagtgtgtgtgtgtgtgtgtgtgtgtgtgtctacacacacagtcacacaaaaggatgccagacaggttcttccagtgtgatttgattccttctccatgatactgtgtatgagttagcaggtgataaggacactagttttccttccattactgaggcagagctgcttgccatgaatgtacctcttaagtatttcccaacccaatctaaccatgaactaaacgacccactggaagaaagctgcctgtctccaacttcctagtactctgcaaagagaggtaaaggaactatggaaaatgaattagaactagaaatatgtcagcctcaggattctgactgccccagaggacaactggggaaatgctttgcctctgacatcactggagcccagtctggatcattttcacacataattgaattcattctccattcctaggcttaggggtgtgagacttaaaagactgtatgctctccagccacaagtgtttatgcaaagggtggatgtccacttggcaagaatgtcctttccattccttcattcagcaagctcttattgtacactttactctgtaccaggcatctacaatatgaagatgaaaagtctgtttttgccgggcgcggtggctcacgcctgtaatcccagcactttgggaggctgaggcaggtggatcacctgaggtcaggagtttgagaccagtctgtccaatatggtgaaaccccgtctactaaaattatgggcgcctgtaatcccagctactcaggaggctgaggcaggagagttgcttgaacccggttgggtggaggttgcagtgagctgagattgtgccactgcactccagcctgggcgacagagcgagactccaaataaaaagtcttttttttttttttccaacttggaaatgggtctccctatgttgtccaggctgtcctcaaactgggctcaagggatcctcccacctcagcctcccgagtagctggaattacagatgcatgccactgtgcaaggctaagacatggtctttgactccaaggaactcatagtttagtagacttcaggatagctaccaggagaaacctatgcaggatattaaaaggctttatgggagttagccagggaagatggatggttagtggcattccagacagaggaaacagcaaaaacaaaggcacagaagcaagaaacaatatgatgtgtacgcatcacgttactggaggatcattattagtgcaaaggaaaagcttcaagtagataacctttcagtcctgacattctgtgattatttgcctgcttccacagtggtcatttacacctgtaggcttttcttgggccactgctatgtttcctagtgtcttcttttcttttttttttgaggcggagtctcgctttgtcgcccaggccggagtgcagtggcgtggcgtgatctccactcactgcaagctccacctcccgggttcacaccattctcccgccgcagccttctgagtggctgggactataggcacccgccaccacgcctggctaatttttttgtattttagtagagacggggtttcaccgtgttagccaggatggtctcgatttcctgacctcgtgatccacccgcctcagcctcccaaagtgctgggattacaggcgtgagccaccgcacccagccatttcctggtgttttcataggttccaatatgcatgctaagtactcatagcttcctaggttgtttaccataaccaccccttacagctggctgggcacacattaccatttcaggttattaagggcaattcttaggtgcccatgttataaaaatacgaacagtgaaggttgcttcctgagttctactatcctactaagacatcagaaataccatctagtccttttaaaagcttccactgtggccaagagcggtggttcatgcctgtaatcccagcactgtgggaggctgaggtgggtggatcatgaagtcaggagtttgagaccaacctggccaacatggtgaaacccctctactaaaaattcaaatattagccaggcgtggtgacgcgtgcctgtagtcccggctactcaggaggctgaggcaggagaatggcttgaacccaggtggtggagattgcagtgagccgagatcatggcacggcactcaagcctgggtgataaaatgagacttgtctcaaaaataaaaaaaaaaaaagcttccattgtgtggtaactttctccattcatggcagcccattctcttcacttttgtagttttcagctgctaaaaagccttcacgaaatgtactccaccatctcttcctgtttagaacctgaatctgtctaatcatccccctatgataaagtggtcaagagtttgattttctgtcagagttcagagttcaaattctagctcttccacttactagttgtgtgaccttgggcaagtttactcaactcccctctactgtagttccctcatttgtaaagtgaaataacaccaggttcatgggggtgcttgtgaagattaataaggtgatgtaggtaaaatactgagcacagcccctggcatacacttaagcactcaatattggctctcttcatgaactaggtaccaattcactgatgatcgtaatattgttgcttccctctttctaggctttatggctctattttgtttgttactgaggggtaaaagataaatgtttaccatcacctagaattgggttctggcctctaaaggaacctgaggcttagatgaattattggctttggaagctggccttcaaattactgcgctaatttatatttttcattaaaaactcagcttgcctcttctatatagctgtcttccctggccctgaaaccctagtgtttcgccataaaagattttaaaattaaggggtcataattccctccccatgatgtgtggattaatggtaagaagatgcacagaacataatattcttaggttgaacgaaataaaagtaaagagttggctctgtttctcacctttgaagcacaaatcaagagatactatgatgaagcatagtttttctttatataggtgtgtagaactttaccataaaaatcactagttcagccatcaggagatctggatcctaggctcttcactgtcaccaagatgctgtgacctctaaccttgtatagaagtttgctttgtactttgcgaggttgagcattagagaggtaaggaaagtgcctagcatcatacctggcgcacagaacccaaaacggtaggtatcatgtagcagttctgaaaatctagcccatcaggatgatgcaaatgggtactttaggcagtgagaaggggaaccacatcttgacacttccagtcgaaggaagagtgcgactgcgcggcagcaaagactacgcctcccagcgtgctttgcggcgggccggcccgctttacccagagtcgccctgccgcaatcgcgcgtctttccaccgaggccccggatgtagattccctcccccgttcagtggtcgtggcctcacagcgactctaagacttggggctctctcattggctgtaactcttccactggattggtagcaaaaaaagaggcggtgcccaaggcgaaaggctctgtgactacagccaatcagaatcgaggccgggctttggcgggaggtgggaacgctgtggccattcggatttggcgcgagcgcggctggagtttgctgctgccgctgtgcagtttgttcaggggcttgtggtggtgagtccgagaggctgcgtgtgagagacgtgagaaggatcctgcactgaggaggtggaaagaagaggattgctcgaggaggcctggggtctgtgaggcagcggagctgggtgaaggctgcgggttccggcgaggcctgaggtgaagtgaagggaaaagagctgagctcgctggaggtctgaggtcgggatcagggaaagggcaggtgccctcggggtagttctagcagttatgcgtggtgtgaaggaggtgaaagttgtaggaaggaaatattctggggtgcgttgagagctgcctagaatgaggactgagtgcaggggcggaaagaactgagggaagactgagctgcagtgtgagggcttgggatagaagagactaaatgtggcgggtgctgggctgaactggtgataaagacaccccgcgtgcctggagggaggaaactagaagttctatataaatcaattcatgtaacttttttttttttttgagacggagtctcgctcttgtcgcccaggctgtagtgcagtggtgcgatctcggctcactgcaacctctgcctgccgggttcaagccattctcctgcctcagcctcttcatgtagctgggactacaggcgcccgccaccacgtccggctaattttttttttttttttgagacggagtctcgctcggtctcccaggctggagtgcagtggcgcgatctcggctcactgcaagctccgcctcccgggttcatgccattctcctgcctcagcctcccgagtagctgggactacaggcgcccaccaccacgcccggctaattttttgcatttttagtagagacggggtttcaccgtgttagccaggatggtctcggcccgtctcggcctcccaaagtgttgggattacaggcgtgagccaccgcgtttggccgtaatttttgtatttttagtagagacggggtttctccatgttggtcaggctggtctcgaactcctgacctcaggtgatccgcccgcctcagcctcccaaagtgctgggattacaggcgtgggccaccgcgcccggcccatttcaggtaacttgttattgcatcgctcaattggttaagaacttgggctctggcaccagatgcccggggttacattcctgtttttctgtgactttgggccactgtttatctcagttttctcatgtgtaaaataaaggctaataatagtacctactcctaagatcgttgttaaacgagttggtacctaaagtgtttataacagcgcccttccacgtagtaggtagacaacaaatgtcagctgttcttgcatagatttggatgtgaagcaaaagtgaatgctaaaataagtgtgataacataattaggaaataagtgttaatcatcagtataaataaattccatgttagttattttctcttcactttcacatattgactagttgtcctcttattttttttaatctagctgtgctgtcgtcatgcctcaaacccgatcccaggcacaggctacaatcagttttccaaaaaggaagctgtctcgggcattgaacaaagctaaaaactccagtgatgccaaactagaaccaacaaatgtccaaaccgtaacctgttctcctcgtgtaaaagccctgcctctcagccccaggaaacgtctgggtaaaccatccattatatcactttttcactagcagctcgtgacctttcttttcttggtaagatgtgtgtcctttgaaggagctttctaagttcagttaagacttctttttttttttttttttttttttgagacagagtctcgctccatctcccaggctggagtgcaatagtgcgatcttggctcactgcaacctccgcctcctgggttcaagcgattctcctgcctcagcctcccaagtagctgggattacaggcgcccaccaccaagcctggctaattttttttttttttttttttggatttttagttgagacagggttttgccatattggccaatctggtctctgaactcctgacctcaggtgatccaactgcctcggcctcccaaagtgctgggattataggcatgagctaccgctcctggcctaagactactcttcattttagttattttcagaatggttgctaagtgcttaccgaactccagagttagacacttactgaggtcactctgaactacttaataagtctgatcttcaattccttaatactgaacttagttctgtcaatgttttaagttaccttgtagttacatggtattatgaaacttacctcaatatttgtgaaattaaaagaaacaaaaacgtgacatgatgaatattttccatcctttaggacagtgattggtaattctttcttgttttggaacatttatttttaaatggggggtaatttggttgtttctggagacatttttggttgttacagctgggggttgctactggcatagtgggtagaggccagggatgctgctagacattacaatgcacaggacagctccttgacaatgaagaattatttggtccaagatgtcagtggtgccaaggttgagaaaacctgtttcaaaatagccttacaatttcatcctactaaaacccatttggtttctactaaatgcagtagtccccacttatccatgggggatacattccaagacccccagtggacgcctgcaatcgaggacagtaccaaaccctacatatactgtgtttttgatttgataaccaagtcagctactaagtgactagtgggtggatagcatatacagtgtggatatgctggctgaagggatgattcatgtcttgggtaggatggtgcgggatttcatcatggcactccacagcatgcaatttaaaacttgtcaattgtttatttctggaattttccatttagtattttcagactgagggtaactagaacggtggatgaagggactactgtagtaagatcagtggtgccatctggtgaccaatatttgctgctaagtgagaaggcattttattttggtggttctgactaaggtagaaattcacctctttctggaagaggcagaggtcttgcacatccttttactatccaatgctatgagtgactacatttttattttattgtgtttcaggcgatgacaacctatgcaacactccccatttacctccttgttctccaccaaagcaaggcaagaaagagaatggtccccctcactcacatacacttaagggacgaagattggtatttgacaatcagctgacaattaagtctcctagcaaaagagaactagccaaagttcaccaaaacaaaatactttcttcagttagaaaaagtcaagagatcacaacaaattctgagcagagatgtccactgaagaaagaatctgcatgtgtgagactattcaagcaagaaggtttgttcttacatggcaactgttagtgcagccattgtaaccaaggctgatgactccaaatgaaaccacccactgggtcttctcattcaccttctgttgtgtctaattgaccttttatgtctggcacaggcacttgctaccagcaagcaaagctggtcctgaacacagctgtcccagatcggctgcctgccagggaaagggagatggatgtcatcaggaatttcttgagggaacacatctgtgggaaaaaagctggaagcctttacctttctggtgctcctggaactggaaaaactgcctgcttaagccggattctgcaagacctcaaggtacattgagagtctgaattatgatactcttggtaaaatgatacttgggtgtttttgtttgtttgtttgttttgttttgttttgttttgttttttgagacggagtctcgctctgtcgcctaggctgtagtgcagtggcgcgatctcggctcactgcaagctctgcctcccaggttcacgccattctcctgcctcagcctcccgagtagctgggactacaggcgcccgccaccatgcccagctaatgttttttgtatttttagtagagacggggtgtcactgtgttagccaggatggtctcgatctcctcacctcatggtccgcccttgttggcctcccaaagtgttgggattacaggtgtgagccaccgcacctggcctgttttgtttttgaaacagggtctctgttgtccaggctggagtgcagtgttgtgatctcagctcactgcagccttgacctcttgggctcaggtgatcctcccacctcggcctcctggatagctgggaatactggcactcaccactacacccagctaattttttgtagagacagggtttcaccatgttgcccagacttgtcctgaactcctgagctcaagtaatctgcctgcttcagcctcccaaagtgctgggattacaggtgtaagccactgtgcctggctggcacttagttaagaaagagggctaggcacggtggctcacacctgtaatcccagcactttgggaggctgaggtgggtggatcacctaaggtcaggagtttgagaccaccctggtcaacatggtgaaaccctgtctctactaataatacaaaaaaaaattagccgggcatggtggcaggtgcctataatcccagctactcgggaggctgaggcaggaggatcacttgaactcgggaagcagaggttgcagtgagctgagatcgcgctactgtactccagcctgggtgacagagtgagactctgtctcaaaagaaaaagaaggctgggcatggtggctcacgcctataatcccagcactttgggaggccgaggcgggcggatcatgaggttaggagattgagaccatcctgactaacacagtgaaaccccgtctctactaaaaatacaaaaaaaattagccaggcgtggtggcgagtgcctgtagttccagctactcgggaggctgaggcaggagaatggcgtgaacccacaggtggagcttgcagtgagccgagatcgcgccactgcactccagcatgggcgacagagcaagactccgtctcaaaaaaaaaaagagttaagaaagagtaggcctggtgcggtggctcacacctgtaattccaacactttgggaggctgaggcaggtggatcacctgaggtcaggagttcaagaccagcctggccaatgtggcgaaaccccatctctactaaaaatataaaaattagctgggtgtggtggtgcatccttgtaatcccagctacttgggaggctgaggcaggagaatcacttcaacccgggaggcagaggttgcaatgagttgagattgtggcattgcatttcagcctgggcaacagagtgagactccgtctcaaagaaaaaaaaaagaaagaaagaaaagaaagagtagaagtttagaagattgagggtttcttcaaaataaaacatttgtaatttcattgtttaaatctttccaaatgaaagtagagcttccttacgtgctgttagctcttcaaagacattttaggctctatcagatctttattttctgaggccaaaataactcccatatttgcatttttttttccagaaggaactgaaaggctttaaaactatcatgctgaattgcatgtccttgaggactgcccaggctgtattcccagctattgctcaggagatttgtcaggaagaggtatccaggccagctgggaaggacatgatgaggaaattggaaaaacatatgactgcagagaagggccccatgatgtaagtattgttctgcttcatgttgctctgtgaaaatctgcaaggtctgttgcccataaaaagtacattttgtatattttctctctgaaggatagttacataaacttaaagggaaagaagagaaggaagatacacctaattttaaattggattacttatagatgatgtggggtatccttgtagcagtaactagagataggttagattatgatctttaaactggtctcagctttaggaaagtgacctgaagtcagcctatatcaaacattagagggttaagaaggtgaatatggatactaactgtttctctttttatagtgtgttggtattggacgagatggatcaactggacagcaaaggccaggatgtattgtacacgctatttgaatggccatggctaagcaattctcacttggtgctgattggttagtgctcaattgttaatgttacatggtggttctaaagtattttttaagaatatatattcagcttatttatcagctattttatcttaaaccagctttctgccgtgtcaaaataagaaagttaaatgactatgtacatcttacctaatagatacatcttatctattgggatggggtaggagacaagtggcaagcaacaattagaatgctagattctataactggagatttatttagctttcagaagatttagttttccctttaggataatttgaccaatgatcaatgttgttgatctcctccttaggtattgctaataccctggatctcacagatagaattctacctaggcttcaagctagagaaaaatgtaagccacagctgttgaacttcccaccttataccagaaatcagatagtcactattttgcaagatcgacttaatcaggtcagtgccaactattttgccaaattatgtgttccttggatcacctgtgctaggaaaatttaacaatagttctaaaatatttttgccttgattgctttattaatggagcaaggagttcctatggaccatagtgagaacatttttatgtgaatttcagcttcattcatttactgggtgtctcagtgttgaaataaaagcaggagttagaggaatcacccaagcgcttttttttttttttttagatgagttttgctcttatcgcccaggctggagtgcaatggcgtgatctcggctctctacagcctctgcctcacgggttcaagcgattctcctgcctcagcctccccagtagctaggactacaggcacctgccaccacgcccagctaattgttgtatttttagtagagctggggtttcaccgtcttggccaggctggtctcgaactcctaacctcaggtgatatgcctgtctcggcctctcaaagtgctgggattacaggcatgagccatcgcacccagcctcaagtgctttctttaatgacctttaaaaaatagggcctatgaaaaaactttttctgttgaaaatgactaaatagattttttatttttgctaatttcagttctgattgcttttttccatttatgaacttctactgcatccgtacaaaaagcttaaatgtgtgaaaactctcaaacgtctccattatttatgagaagaaaaggcatctttttaaccctaaagagttgccaatcaagtttagggttaaatgtgaaaatatttatgcttgggacctaaattacagagggagaatcttatggttcaaactgtcatcttctatgtcttgtctgaaggtatctagagatcaggttctggacaatgctgcagttcaattctgtgcccgcaaagtctctgctgtttcaggagatgttcgcaaagcactggatgtttgcaggtgagttacggctctgttgcattcttttattaaaaaaaaaaaaaaagaaatgctgttaattgtctcatgtaactcaagtgaatgtggcttaagaggctctgttctgctacttttttacgctcagaaaggaggacttgtttctcagtggggagctctggatttccaccgtgttaatgtctgaaacattatcagtccattacctacagagggagaaacaaatgagatgttgctggcactccctgtggtgattatagattggttaattacatttgtattaaaaaagactccagtttacttttccattagctggtctcaagcaggtttatttatggacctgaaccgtctttgcctttagacttgttccccttcctttccttttgtgagcaccccttcttcccttcagttggtggtcccccacagttgtactccagacctctttctcccttcccatcctcctgcccctcctgctggggaaagcctctgtgccgactgatgaaatttcttccttcccagtagggacactgggtccattaaaatgatacttgctgtgctggcctgctggtccaacctccccctattgctatgcagaagacccaggtctggcttatggcttcctgtgggcaagtactttggagagagcagtgggagagtaagctcttcctattgctagattgcatgatcctgaatttgaaagtttcccctaatcagcaaactacttgggtaaagactgcaactatgagcaatagtcatgtaggctagcgtggtttagcctacacatatcctatgtatatataactgaagatatcccttttaggtttggtgtgtatgggtgatgctgactccctttagtcagtcacccacactacatatcctctctcctacccatgacattttctcctcatccaaaatgttatcattggcttaatgtatgatgacctacttggcatccattaggaggaaaccattgaagtttctcaaatctgatgtccatgaattatttcaaagcaattaagtccccttatctgagaaataacccagttttgtttgggggctttaaaattataaaacatcataattttaaagttacacgtaggatatgtgtaggctaaaccatgttagcctacatgaccattgttcatagttgcagtctttgagcaatggtcattaatgtgccgcttttgaggctggtggtttggtgtgtttggtttggctcagactaaattaattttagaaattttttttataggagagctattgaaattgtagagtcagatgtcaaaagccagactattctcaaaccactgtctgaatgtaagtagtttatctccttcctgtcttcctttgtaactagaagcttagcttttctgaggaaagaggtagaaagatgaaatgaacatagttaaatccaaactcacccatttttatgtgtgtctgtgtttttagtccgtttcgtctactttatttcaatcttgcctgccagtactatagttcgtgcattactggaaatgagttcccagggtattgattgcgtaaatggctgggacagagtaagttttttttccaagctctggaaatgaaacttgtagacaatgaggttggatcagctctctgggtgcttatgttgcgtgcactttaggtctcaatataggtgaaagcaaagcctgataaataagggagaattgggtaaaagaattgtgaagccaggtgcggtggttcacacctgtaatcccagcactttgggaggccaaggcgggaggatcgcttgagcccaggattgtgagaccagcctgggcaatatagtgagaccttgtttctacaaaaaattttaaaaattttgcagccattaaaaatatgagttcatatcctttttagggacatggattaagctggaaaccatcattctcagcaaagtaacacaggaacagaaaaccaaacaccacatgttctcactcataagtgggagttgaacaatgagaacacatggacacagggaggggaacatcacacaccggaggctgttgggggtggaggccaaagggagggagagcatgcaggacttaaaacctagatgacaggttgatgagtgcagcaagccaccatggcacatgtatacctatgtaacaaacctgcatgttctgcacatgtatcccagaacttaaaaaaaattaggcaagcatggtgtgtgcctgtagtcctagctacttggcaggctgaggcaggagaatcacttgagctggagaggcagaagttgcagtgagccgagatggtgccactgcactgccagcctgggcaacagagcgagaccctgtcccaaaagaataataataagaagaattataagttcaacttgggatatctcaagcttttaaacaagtctagagggtagaggtaaaaagatcatactgctacagtaagctgcatggtatcacaaatgacaaaattaatattccattccctcagccttgttttggttgtggcaaatgtaaaatggccatgaactacgtatcttacagtatttgatatccagtgttagtctttataaacagaatagtaagatttgattgtttctttttcactcctacactggctgggagtttaagtaaaattgtttctggcattatagttctgcatgaaattctttctttttttcatcaatttgctaaaataaaataattaaaaatgtttcagaagtagccaaaaatagtgcttaggctaatagtaggcaatatataccaatgtatagacttagatactggtttcttcctccttttcaacttttcagattatccccttttcctcctcctttttccccatcagtaacatttaggcttgtcactggcccctgtgagcaccactaacacaaacataattcaaaaaggtaaagaggttgtaagttctatcttttgacttctggtttgtgcgggattggcttttttctttcttttttttttttctttttgtgtaaaacaaggtcttgctttgtctcccaggctggagtccagtggtgcaattatggctggtgcgatcatggctcactgcagctgcaacctcccaggcccaagcagtcctctcacctcagcctccccagctccagctactgctaattttaaaatttttgtagagtcagtgggtggaggagtctccttatgttgcccaggctggtctcaaactcctgggataaagtgattctcctgcctcagcctcccacagctttggaattacaggcatgagccaccataccaggttgagattggctttcaagggctccagaaagctatagggagaatgactttaactaaatataagaagaaaatttataataactagaactaactgggcttccttgaaacatagtgggttctccagcattgaagatattcagacaaaagctggatagatgccacttgttgagattgttctagagaggactcggccagtggatagggagtaaaaatagacttctaaattcctttcaattttaagattcttttacttgatctgtgatctccggtttctccattagtcctctgcagcatccctttgtggtaatgtaatattatagaagtaaattgttgtggggcaactgcaagtgatttcaggaagtaacttcaggtaaaggttgttacagaacacatttctttgtcttggaattcatgcatctccaaacgataaggccatagtcttttttttttttttttttttttttttttgagacagggtctcgctctgtcaccaggctggagtgcagtggcgtgatcttggctcaatgcaacctcctcctcccaggctcaagccatcctcccaccccagcctcctgagtagctgggaccacaggcacacaccaccacacccggctgttttttttgtatttttagtagcgatgggggaaacccatcgccttgttgcacaggctggtcatgaattcctgagctcaagccattagttatttttcctgatcctctccctccaccctcctataggccccagtgtgtgttgtccccactatgtgtctatgtgttctcatcatttagctcccacttagaagtgagaacatgtggtatttggttttctgttcctacagtagtttgctaaggatatagtcttatgaagcttattggcagtttcccaacccctggcttttattaagatgatgatatctggccaggcatggtggcttacgcccataatcccagtgctttgggaggccgaggagggcagattgctttgagctaaggagttcaagaccagcctgggcaacatgatgaaaccccatctctacaaaaaataccaaaaagaaaaaaaaaaaaaaaaagatggtgctatctgctagcatatccaatgacattttctcaagtgttgctctactgctaatcagcttgggcaagtgaaccaaacctcaaaggtcatttggggaagccatctgaagggctgacatggcagcgacttcactctccacatttagccactcatttgatccaaaatattcggtaattttccaacttttttttccctttcttttttttttatatggagtttcactcttgtcgtccaggctggagtgcagtggcacaatcttggctcactgcacctctgcctcccgggttcaagtgattcttctgcctcaacctcccaagtagctgggattacaggcgcctgccaccacatccagctaattttttgtatttttagtagagatggagtttcgccgtgttgggcaggctggtctccaactcctgacctcaggtgatctgcccgccttgatctcccaaagtgctgggattacaggcgtgagccactgcacctggccttttttttcctttcttaattaccaagcacagtcaccatctttgcttcaaggttctgttattctatacctctgagatactaggaactagcctggcatggtggcacgtacctgtaatcctagctacacaggaggctgaggcaggaggatcacttgaacccaggaagccaaggctgcagtgagccatgatagtgccactgtactccagcctgagtgacagagatcctgtcccaaaaaaaaatacagtagttctctggtcctttcatgaggtgggttttgttcctctgacattaaattacattccataggacaaaacagctcactatttggcccagagaaagggtaaccctacttttcaagtcatcccacattattttgacatccttaagagaatagcattatctctcatcctttggcctctggttagagatttaaaacctctgctttgccaccatgtgactatacttgaatttcctttagctcaaacttagtatcatctgtctcatcatacatacacacacacagtattttagaaatcgaattaagcttggcttatttactttataggtaaatcaccttctgagcctctgattcccaagagggttggtcttattcacatatcccaagtcatctcagaagttgatggtaacaggatgaccttgagccaagaaggagcacaagattccttccctcttcagcagaagatcttggtttgctctttgatgctcttgatcaggcagttgaaaatcaaagaggtcactctggggaaggtaagttgggatggagcagatggaacggaggtagagatcagaatctgctttgcagagcaggtattttccaaaaggcctatgatacttcagctgataataaatttaaaatggattttaacagtaagaattaatactggtactatataaaaggcacctatttcccttggattgtggttgagagtttatcattaatcctttccctatcctccccttcatttctgcatctctctaggaaatatataaagcccctttcctacattactgtataggttttcgggaatatctacagaagcctgttcaaagattttattgaaaagaggaagaaatagggtattcagataagtttttgcaaacccagactcaggtttcttaaatgattaaaggctataagcaatgtgacttttaagcagcgtttgttctcccttgtttcctaccagttatatgaagcctacagtaaagtctgtcgcaaacagcaggtggcggctgtggaccagtcagagtgtttgtcactttcagggctcttggaagccaggggcattttaggattaaagagaaacaaggaaacccgtttgacaaaggtacaactgcttttttgtgacagtgtttttaattgtcctattttgtagagtgatgctaaagtaaaggtttattgttaaacaagatgaccacagttagttaaacaagtcgttttttgttaggtaaggtttaaggtgtgtaaagatgggagtgtgatatgaatattttttcaagccattggaaaaaaaagtgtttaacttgcttgccttttgtgagaaaaagtttaatatggtagaagtttgtatactgacaactttgcttttgtgagttccccagtgtgaaaaatccttttctcttctttccaggtgtttttcaagattgaagagaaagaaatagaacatgctctgaaagataaagctttaattggaaatatcttagctactggattgccttaaattcttctcttacaccccacccgaaagtattcagctggcatttagagagctacagtcttcattttagtgctttacacattcgggcctgaaaacaaatatgaccttttttacttgaagccaatgaattttaatctatagattctttaatattagcacagaataatatctttgggtcttactatttttacccataaaagtgaccaggtagaccctttttaattacattcactacttctaccacttgtgtatctctagccaatgtgcttgcaagtgtacagatctgtgtagaggaatgtgtgtatatttacctcttcgtttgctcaaacatgagtgggtatttttttgtttgttttttttgttgttgttgtttttgaggcgcgtctcaccctgttgcccaggctggagtgcaatggcgcgttctctgctcactacagcacccgcttcccaggttgaagtgattctcttgcctcagcctcccgagtagctgggattacaggtgcccaccaccgcgcccagctaattttttaatttttagtagagacagggttttaccatgttggccaggctggtcttgaactcctgaccctcaagtgatctgcccaccttggcctccctaagtgctgggattataggcgtgagccaccatgctcagccattaaggtattttgttaagaactttaagtttagggtaagaagaatgaaaatgatccagaaaaatgcaagcaagtccacatggagatttggaggacactggttaaagaatttatttctttgtatagtatactatgttcatggtgcagatactacaacattgtggcattttagactcgttgagtttcttgggcactcccaagggcgttggggtcataaggagactataactctacagattgtgaatatatttattttcaagttgcattctttgtctttttaagcaatcagatttcaagagagctcaagctttcagaagtcaatgtgaaaattccttcctaggctgtcccacagtctttgctgcccttagatgaagccacttgtttcaagatgactactttggggttgggttttcatctaaacacatttttccagtcttattagataaattagtccatatggttggttaatcaagagccttctgggtttggtttggtggcattaaatggcaatttgtgactgagacaccagagggcacccttataacattgactactttgaaaggggatgcttgaggctgaggtagttttgagggaaagggggaagttctagtttgatttgtttgggagattgctgtcctttcataactgaagcaaatgcttgaaatgtaaaccatgtgtgatacgaatgatctgagagccagtgaccaagtctgcttttccctgagctctcctgctgccgcctctacctttctgacatggccttccatttggaacttgatatgtgtacaagtgatctgttggccactgtttcattcatcctgaccactgtatccgtgtaatgtgatctgagctacaacaggtggtatgggatagaggcaaggaaagcagagagagccctctgaaatgaacactacccactggtgtgtgtagcacatgatagtctgtaggcatgagtctgaatgttgttctcacactcctttactagagtattcgttccctctgaaggtagtttgaacatggaaacacagttctatacctagaaggttggaaagtgtctgggactataagggttaacatgcataattgcaaagattgtccgaaggctgatggaaagcagagactgaatgggattgagaacagatgcgaagcttgatttaaattacattttattggatgctgcagccttaagagacgtgactgctttacagtttgtttccacactgtgggcagctgctgtctgttctgtgtccacagtaggatcctgcccaataaggagcagcctccccacctcattgtgtttgaggcttggcgccttcctcttaactgtagggcttgagtcaggaacatggcttgactcgcagtggggctgctatgtatcctccctggcttccagccaaaatcacattggtagattcaaaggggccaaatttctttcccctctatctttccctttcccctggttttggaaatagagttttctgtctactgatttgttagtttccttttcttctcccctcactgtcaatttctaggtcattgctgctcttaagactttagcagttggaacagggttggttctgtcaatgatgcatgaagcagacttagtgtccctgcttggcttctgctgcccttgtgggagcaaaagctgatatatgtttgtcagtaaagtcttaagtgtaattcagactgctgaggaagaaagccctttccttgctggcttttctccctgaagctgagagcttcaggaaggtggtaggagttttagtgggatgggatgggatgggcttgtggttagcagtttttgccaggatcataggctgcttcacttagagtagtggcaaagatgctgacctacattcttccttttgaaggtgatggagtgtgtgtctatatcctggtttatctctctcccccaccccaaggaagctgattaagcttccatagagtgttgggtgttgccatggaaagagcatagacaaaataaattgtgtgtttcaaccccagagctgccacagatgtttctggctcaatggagacttgcctgtggctagctaactctgcaagaatgtgtgaggtccaggctgggggtggtggctcacgcctgtaatccagcactttgggaggccgaggcgggcggatcacctgaggtcaggagtttgagaccagtctggccaacatggcgaaaccctgtctctactaaaataaattagccaggcattgtggtgtgttcctgtaattccagctactgggaggctgaggcaggagaatcgcttcaacctgggaggcagaggttgcagtgagccgagatcgtgccattgcactccagcttgggcagcagaatgagactgtctcaaaaaggaaaaaaaaaaatgctgggtgtgatggctcatgcctgtaatcccagcactttgtggggccaaggcgggctgatcacttaagggtcaggagtgcaagaccagtctggccaacatggcgaaaccctgtctctactaaaagtacaaaaattcactgggtgccatggtacacacctataatcacagctacttgggaggctgagacaggagaattgcttgagcctgggaggtggaggttgcagtgagatgagatcatgccactgtactccagcctgggtgacagagtgagactctgtctcaaaaaaaaaaaaaaaatgtgtgaggtctaagctacccagagatcaaaaagttggcagagccttattctctctgcgccccctcttttgcattgctccctacctttactaagtgtccctttgaatatacatcaagccaggtgtggtggctcatgcctgtaatgccaacactttgggaggaggcagcagcgggaggattacttgaagtcaggagcttgagaccagcttgggcaatatagtgagacccccttacccttctctaccaaaaaaatcttaaaaatcagctgggcatggtggcatgcacctgtagtcctagctacttgggaagctgagatgggaggatgctttgagcccaggagttcaactcggcatgggctatgatcacaccactgcattacatcctgggtgacagagcgagaccctgtctctataaaagacagaaagcagatacaccaataagaatgagaagttgggaataagatgtgatttaggttttatatatatattatatacatattatatatattttatatatataatgtatattatatataatatacatattatatattatatacatattatttatatatatatatatatatattttttttttagatggtgtcttgctctgtcacccaggctggagcagtggcgcgatctctgttcactgcaagctccgcctcccgggttcacaccattctcctgcctcatcctgagtagctgggattacaggcacccgccaccatgcccggctaatttttttgtatttttagtaaagatggggtttcactgtgttagccaggatgatctcgatctcttgacctcgtgatccgcccgcctcggcctcccaaagtgctgggattagaggcttgagccaccatgcctggccggttatatattttttaaatatcttgagacgtgttaccttgactgctgagggaggacaaaagagatccaagattgaaattttatttacatttgtatctgtgcctagcaattagtatagtgcctaatacctggtaggtactcaatagttgtttaacagataagtgaaccaaataagatactgcctttccctcagtggtgagaacagttctaagctgaaggtaaacgttggtggtacttttgcacagaggtggagcaggcccctgcataagaagggtgctctgtcttacaaaatgtgtcttggcacagttttggagcatttattagcctcacagatgcattccaatcactccctctgatgtagtggcattttgcttgaggcaacttccatgttgctggtgggacgctttggctatgaggggaagagtcttatctacaggctgtgaagagggctgcctgtctggatgtcactcagtgtggctagattggccagaagctgggtctgtaggcaagggtttagggaggagcccacctttgatgtccctctttttaacttggggcaagttgtgatctcaggttcttcctgaaaagataaggtactttctaagataccttctcttaagctacaaacagtgcaggtcttcctcttagaagaggtgtgttccgtaaggggagaaggtgtgccctctggcctccccttgattttcaaccccagccccaaggcactggtagtggaagttaattgggtgcaaggggcttgggtaaaggctgaagactggtgaaaggagagagccagcttcgttttttaaaaagctctaattgagttctgaatcagcctcactccctttgatccctcctctgtttcccacactgcctgaaagagctagatcagcactttataacaagggtgcgcctgctccccgcaccgccccccgctcctgacgctctctgctgccgccatccactgcttgtctccttcagttaagataatgaagatgctgagagataaaatgtgtatttaataagggtgggggtagggaggcggaaaggggcaaccagggccttccctagtttggggcctcgccaagacttaagctgaaagcaaagctagagtaagacttggccccagggtgtgggggtttctgggcctcaatccagctgacttcactgcctgctgtttgccctaaattcccccacctccaccctctcacccccacactgctttcttcttgctcccaatgggaaaaaggactcttgcttcaactttcttttcagctggtaacttggcctttggtgcggtgccccccaccccagtgtcagctgcaaggtcgggctagggcagccccctctagcctaggcctgtagaagctgtgggttcacagtggggggtgaaaaagctggagttaatgaagaccagctgctagtctgggttctgcctacagctagctggaggccagcctttggtggtggttgatgggggggtggggtgacctccatccatgggcacaaggatatcctgtggcagctaggcttgtgcttctctctgagcttagttttatccttagtttataagagagtatctgtttccttcccctactcctctcctccccaaataacactcagctcttattgaactttataactgtagtggtggcccagctgagatctgaggatctccaaacccttttgtaaacactcattaactgcctgggaagaacgaagagccctgtttaacagctgggagagaactgaggcacattagggtgaaaggtttgacctaaactcaccccatggactccaccctggggccttccatccttagtccagctcctttactcagttcttcctgcaagacagaggtggaggcattgctggtgtcttctccccttctagggagaggccatgccctctcccctcaagtctgtcgctgacttcctctggcccttcccctcatgacgttttccctgctctgctgctagagatatgtgcaactctccttgcaaaatgttctcaatccacaacttcagaattcttatccagctttctcttgcccatctagcccaccaaacctgaattctcccttttgagctactgagaagactggctatactaaactgaatcagtgaccttgaagttgatctgttgtattgaggtccctctgcccctatatttatcctaaatggtatctaggaaaatattctctctttaacttgtttattctggtcataaagattcgggacattactgagggctgggtaggggcactagttgacctctaggttctacgtcctgttcttccactgacaattaccatttccagtaataggtgtaacccaaagttcttttttgtttttttctccttccctaaccccacctgtttatactcttgcctatatatgtgtatttgcagaccccacacattcccagatacacatacattggtcctacatgtttcccctgtttccagctgccatctaagtgagcctgcactttttacatgctgaaaatcttttttcaccctctatggcctcctaggtccttgggaataattgggagggatgaagggactcctgcagtccatgaggaagaggacagaagtgagcgcccaaccaaaatgaatgctccctttccaaaatctctagctgaatgccttagcaggagtggcagggaaagagatcttaaccccacctccagcaccaaaacctaaatccatctgctcagggcaggcaggaagaaatgtctattttctcctgtttcaggtcatcctatcctcgagttatccatatgctgtgtatttgagacagggaactgttcctgtccccagccgatgaccagacgcccatctttcttccagtgggttacttctcccccatcagtccttcgctctgcgcccgctgacccagtcggggctggctggtggaagagggcggggagagccttctagttggcgagtgggctttaggacccaacgggaacccgtgcctcttgcagcagcctaacccagaagcaggggggaatcctgaatcgagctgagagggcttccccggttctcctgggaaccccatcggccccctgccagcacacacctgagcaggtaggaccatgcacaccccttcccaattctttggccgcctttgaccccggcctctgcttctgatctagccatttccttctcgccagttctggctttccccatccctcctctcccgtcgctcactgtagtcctgggaggtgggagcctgggaacagtggggtgtctgaaagctcagagccctctgcaccctccagcacccttcctgcatttctcctgaggcagttcccgttctctagataagagtggggagtagggggaaggtctgcccaggccccacgcccttgcaccctcctttgcggtattgcctaataccccttcccccacctcacctagactggagaattggcaagtgctgaggtaacagagagaggagagagccagagagggacctgagctttcccaagggatttctttcttgcttcctcacccaaagagctcaggactttgcccctactccctacacaccttgtaggggaactaatgtccccttccaggttcatctcacacttgggtggctaaaggctttgctagagggtagtggaggttgtgagcattttggtgagcttttcctctaggaaagttctttcagcttagagcccccatccatgtcaacatttcaacacctgctgcagaagccccccgaccccacctgtgtgtgtgtgtgtgtagggacaatgtggttgtaagatctagaagctttggatagaggtggctgcatgcattgaaggggagggataccagagtgtggcccaggccagaacaggctcagtccagatggctagggaagggggtgtggaccagattgaggaggtcacccagccttgccagctccctgagcttcttggctttcagaatctcaggctcctggtgtttctctagagctacaaggtccccaagcttctgccccgctacaggctctctgggagagggctagatggcacctactgtttacagtggcttatttttctctcctgtggtgggcagacaggccctgctctctgaagatctagggcgtgtcattctggtttggtgggtttacaggaagggtgtacaccttgtctgacttaccatgtgtgagtgtgtgtcttgcttctgggggtagtagactggggaggggggtgatagaagagactggtcacactgagggaactcctctagcaatcaatgtatgataggaatgggtggcatgtccccatctggtagctctgtctaggtgtggggtgtgctctgcattcttccatggctccccgggtcccctaaaggttggttttagaggacagggtggataatgaattggcttcagacttcgttctggtcttgatccaacaaggaaagtagagattctgactgtgagcagtgaactaggaatcagaggcctgaactggagacttagactggttacttaactatatgtgtttatataggtcttcccctttgctaagccttagtttctccatttgtaaaaatggctatcagtagcaagcagggacattgccactaaaaccacagagacaatgtatcgtaaagctcactgcaaacggtagtaatggctgggggaatctaggatggaatcctcttcctaaatctaggtcaatctctccgcctttagttttcttcccccatcctttgcccatctgggggatggaggaactaggcagggctattgccccggttactgcagaattcccctaatgcaggttgtagctgttaccagagcacctgtggtcacagagtacagatctctccaccaggcatttcttcctctggggccccatacttgctcccctgagccatgtctccaccttccttctgccatccctgcttggcgtccttgtctctctctcccctgcccagtggcctccttgtctggctcactgggcaggagccctaatcggattcgacagctgagatatgtgtggcggctaagagcaggcaggagggaagccagtgggaggatggtatgaggactgcccctggcactgccccggcctcccaagcaccaccttgggcctgctgatttcttacttggcttggccccaaggaaggggtgccagaggaagctcaggaatgaacaggctggggtctggagactaggagaggaggaaacacaccaaggtcctcaggacctggttgatattcgatgaccttaatgtcagtgtcactgactctgacaaggaggaaaggacagcgatgagccaggctgacccccgccaccccattcccatagccccactttcttctctcttcttgttcagaaatgtttcactttgcctcatctagcccctttggccagtaggtcacatctgggagcttctgggggtgccacatgtctgcctcaatctgggctgtttcctcccctccaagatatttcactgtctctgggctgggcgccaggactcctgggtttccctgcctgtggtgcagggctcccctgcagggctccagagagtcgcttagctggtttccttcctcctttgtggggagggccttcccctagggctgggaggtgtcaggaatcccaggtgggacaggggtgggggcacagtagcctctggcactgtagcaccccagcttctccctcctagcctctgactcagcttgggggcagcacatgcccagcctggcaggcatggcctattcttgcctccaggcttctctctttacagaagcctacatctcctgctctcattttttagtttttttccccatgatatctgcaggtggctagtgaaatccctggttttggggagcaagggactaacataattgaggctggggcactattttgtcttccctccagttgggccaggatgaaggagactgtcacaaacttccccaagccaattccttctgccctcaaaagaccagtcagtggagccaggccctgccctttgggtgcccacaatgtggttggcactgatttgtcagaaattgggaaggtttccctctagaccgcttgcctcctttctcctcctcccgcagggtaggggcagctctgtgattgcaggcacttatgggcaggcctccccctaggaaaggggtgtgggatgcccccaggatggccaagttggcgctagccccaggctggagtgctggacatgattctgacctgggagttagtgggggtaaggcagggcatgggcctccctgcccccctcatttcctgctctttgggcagctgtgggcgagaaaggctgcagggactatttttagttggtcagtcccctggcaggagggacgtgcagaaaagcacggggcaggcagaggggctggccaaggtgagggtaagcaggcaggcagaggagtgaggaagggccagaggggcagaagacagcaaggaggcatggggagcaggggcaggaccttacccagaggggcatgacccaggtagatgggccgggctggactgggtggaagagtcctggcaccctacagggttttctttatccagctggactcagagctggaaggggttttagaggctacctaggcaatcccttccccttgcagagaaggaaactgaggcctagagagaacactcaatcagtcattggctgtgttgagacctgaacccaggccctccctttgcaccatttttctgttgtcatggttcctcaccacagctcagtgtgcttcccttccctactgcagcaaggaggaccacgagccaggcacacctggtccattttcccatctgcttttttgtgcagggtctctgaaaatcccagcttggtttgtttataagtctccatgtggaaagagtctgtgtccaggctagaaggaggtcagagttgggtttgtttgggtggcctgtggccactggtgtgaatggagctgctggacaggctccagcaggctcacaggctggtgagctgtggggctaggagacaccttacagaagggacgtccagactccccagagccctttgtgagccctcctcctgccctgcccaggacctgtgggtcatggtggttgtttgcccatctccccaacaaaagaagggagcagggctgaggagtggggagattactactggcttctgatcgctagtcagaaggaggccccctctgaggcctggaggcagggaaagttggggcaagttggggtgtgtatggggagaaaactcaatggagaattgtggtccctcagaattcagtctgctttctgtcttctgcctcaggctctccccacaggccaccatgctgcacagctgcagggggaaccattccatagactatgatgtgaatggcaccccctggggttgttcaaggccctgcctgtgtagccacacgtggtgcatctgtctcccaccttcttccttcaaattagttcagacccacctggaaggaggtgttccagacaggccttaatccaacaccctctcccctaccctgcctcatgccactcaacatctcctattcctctgctgcccacccccaacgcaccaagcaagtcatggtgcaccaccaattgtggttcagaagcccctccccttctctctacgcagtttctgtgtctcttgggggctgatttatcataccccccatcaagcctactgcagtgtgtgagaaatcaatagtgcaaatggattgaggctgtttagcctgtcaactctccttgggccccaccaactcttctgggacttgcggagttgctcagtccccttctggctcaacatacacatatttagtggttgtagccagagcactgagcacaggaattattctttctgttggtctctgtctcattctctctcatatactaggctggtcttaacatgacaaatactcttgaacatttattttctagcttgggtggacgggcttaaagggcagtaggctgccagccagaggtagggagggaggcaggtgggtgagggatatggcgggtggaggggtggggtgggggtggggacgagctggggaagggattgggtgacagcccaccccatcagctctggtaactcaatccctgcaccccaccctcccaatttccctcctgctcaacaacttcagcagctgctggcagaagcaaggctggcagaagtgtgtttgagtgcatgtgtatatgaggggagagggtgagaggggctgtgggggcagggagtgctgccaggacatgttaaaggagactcacagcctgggtacaacttgggtggcaggaggaggtggggcaggtgggagagtgggtggtgagtgatgggcaggctgcagtgggggcagggcagcacaggggtctcacaaaacttgttggcactggagcggggcctggtgtggtgggggtgggcagtggtgagggggcaggggctggcacagacattgctggccccagaatgctgaggcccattctttgccagggggcgcatgtaaccatggagggacagtctgcccctgtctgcaatccttgggctgtgcctgctgggcatcacagtcttggtggtgactaagtcacttctgtcctggggctggcaaggtgccaggctcagctcttctcggtaggtgagtcactgccctggcatctcccccggatgcagctgagtcacccagccatgcctgctaggcaggtgggcaccaggcttgtggtgggggtggagggctatgtgtgcagcccccagtgtcttctctgatctctctctggcatgtcctggccccacccataaacctgcagagccaggcaaggatggcgcttctcccttgtgatccactaaggggtgaaggaaaaggtagcagggcacagagtggagtcatacatgtttgatttggagtaagtaggggaggaaagagttgaggagggaacattgattgggttatatgtatatatatatatatatatatgcttatatgtgtatatatatatatatatatatatatatatatatatatatacacacacacacacacacacacacgtatatatttatttattttaacaaaaaagacacagggtcttgctatgttgcccagacaggtcttgaactcctggagtcaagcaactcctggcgtcccatcttggcctcccaaagtgctagaattaaaggtgtgagccaccatacctggcctgggtttgaatcccagccctgccattgacaagctgtatgacgttgaggaaggcaattttctttttgagcctcagttttttcatctctacaatggcaacaggagcctgccccttcaggactgtgagaatcaaatggagtgggactattaaggtacttgtgggaggagctccttttgggatgagctaggaggcttgggaggggaagaggagtcagctggagctggttccaacaaactcccgcaccatggtcttggagggccaattgcttctcatcatctcttcggagtatcacttaatgctgttcttcaggagtttccacaggctgtgagaagacagccttgttgtactagaagtgtgggccctcctagggtgtctcagagctatattttatctcttttgactactgagaactgccactggccctggtacctgtccagactctcttccttcacttcctctagtttgaagagggatggggctcagactcctcccccagcctatctcctgtgtgcagggaaacagtaggccccaaggagtgtccttcttagagtgaggcgccccgagcctgtggcttttctctctctgctagtttcctgctgctccctgggtacccttctctcctcctgcatcagagtccctggtgggagggggtggtggaagccctgttatgagcccagcatagctggagttcaactgctgctgcagattgaagactcctggtcccccacctggggacctctcctgccttctgcagtcaagcttgggtagggctgggccttggacaggtggtactggtttccctggacaggaaggaaatgccccaaagatgtgcatgctttgtgtttgtacacacgggtgctggtcttgtttgagtgtctgacccctgcggggggtgggtttgtgtgtatgaatttcttccctcatccacacatggggctacttctgtgtctgtgcagaagtgtgccccaccctctgcttcatgcccttgtctgtgcacaaatgtgtttggatgtacttgttcatgcgtggatgtgcatacatgcgtcggggatgtacacatccctgccctgaatgtgcacgtggaaatgcatttgtaccaggatgcctgaccctatgatggcaggtgtacctgaaggtcgtcccacttgggaggcagtgtagctgtgtgcatgcatgcttgcattcttgtgtccatgagccttcccctccagcctcaaggaaggaagacaggtaggatctaggttgggaggtgtccgtgggcactaggggcgggctggcgctgactccagtcctgggctggttctcacctgggcagagctccctgctgttggcggggctcaggctggaaggcccttgggggagcgcggctggggggtaaggggttaagcggtggcgtccacatctgggagccattggcgcattcctgccggctgagcgcatgtttgcggatgaatctggacaggacagggcgggaggggctgggcgggaggttcgcaccggcggacggaaatccagacgggagcgggagacagctccggcccagcaggcgggaaggggcctggggaagcgcggcccagcactgctggggcagtttcccgtgcgccggccctcagggcaaagggtcccgccatcctggcttgtcctaccttaccatggctcttgggctaaagccagggacaatcagatacttcaattctagacccggctctgcaaccggtgcgactgtgcacaaaacccagtgcctgctcttggactctctttccttgtttgtaaagcggggtccgtcggaccagtgggtttgagagctctgccaccgggtcaggctgagagtctcctcactgggctggaggcctgggagtgcagcacttccccttccagtgggaagttctgtgggggcacttgtggccacttctctgcctgggaacagggcgagaggggagtattctaagcaattctgcttccccctaagcccgccagtggactgctagcgatggggacaggatcctcccaaacagagctgcaggctgggaggggggtcatgactgtattggggactgggggtctctcagatggagggtgattcagatcctgtccagctggaacatgaaaaagagctttcctggcttctccagacttgttcgggagagagaagcttgagtgtgagtctttgagcacggaggggtgctcctgggcgcccctactggaagatccaaaagtcttgccctttgaggagaagagtactttaagggggctgggagggttgggttgagccagggttcctaggacccactggagctgcagaggtgtttggggaaagaagagatatacttgcgggagatctactcctggactctttttttttttttctttttcttgcagctgagataattaagatccagggaagggaagtgacttggtcaaggtcacacagctctcagttccagctggtccctagaagaggattataattataggattcaggggcttgacagctagggcaggagtcaccgcactcacttccatattacgccgccgcctcacttctcagatttaggtgtgggtgtgtgtgtggttggggggaaaggagtgtaggataccacacgctgcggtcttctccaccgagcgctattttcattctttccgcagaacctcaccccgttcttgctctgaatcttcggttctgggtctgagggagggattctcccggattcccacggtccagtcttcaactaggagtggctcctttaagactcgcccttcccgaggtctattaaggagaggcgggggcgggcgtgagcctgtagatccgcccctgactggtgattggtcggtgggcgggcaggggcgggcctgagggacagggcctccccctacctctgctccgtaccctccgccccttcagtctggggctccgggtaaagtttcagcctccgcacgtgactcgctatggccgctgccatcgccccgcgcccctgagccgcggccccctggacggctcctctcccgggaccccgcaccctgatgccgagcagcaccagggcgccgggttagggcagacgctgtgctcgctggcaccccgaacgggttgcttcccccgctgcgaggtaattcctcccctggggattttggggagcccctggttcccgcaggcgtcggggccccatgtcctgccccagattggtgctgcgggaggggactgggtaccgggaggcttccgacgggaacccggggtttcctgggcttcccaactcgctgccgccgtgtccagggtgggggagccccgtctgtgagtctgcctgcgccgtgtcttcgcgcgcagccttgaggcgtctggggccgtctgctgcgcgtgtcccccgcgctcgagctgttgcagaaccgccgctgggaacttctgttctttttctctttaatgataagcaaaacaaaaagacttgaattcaaacctgtttggggagagatcggatgctcaacggactagccccctctctttttccctcctgttatctgagctgccctgtggtttggggagaatcagccagggggcccactcccaccagagggagccggccgggggccgggccggttcagctggtgtcccccgtggagtgaggggaaccgtcagaattgggtgcgggagccaatgcagtatgtgtgtaggggtgttcctgggtcttgtgccaccatggggtgtgggaactttttggggtgaggggaagacggaatagactgacttgtcgactttgctctgctgagggtgtctgggacctggtgccacccacgaggcttggaagctgctggccagatgtgtgtgtgagcctgttgtggggttggggggacggctgggaaatgagcttggctatgtcccctcatctcctctctgggcactggcctattgtcaggctgctccttgcgaaaggaaagacaggcctccagtgtgctagggtggggatggggaccaactaacccggaaaccagacagaagagctccccagccttggagatgtttctgcaccctccatcctgtcttggatcagatgcccagtgtgatggcctggaagggtacctcctgccccctctggctctgtcttctgtaaccaggttgccttctgtctgatggctgtgtgcacatatgtgtatgtagatattcttggaaaggattgtttctgagaacaccccccgacccccccaccccctgctgcttaccccaaggatcacttctgcccctgacactccccctcctcagtttcctggccaagacattctgggatgtctcttatacccttctctggttgcagtcttcatagggcaagattgttttgggggaagtggttctgtaaggaccttccaggtcttgctaggaaattggacctcaggccccaaactctcctacagggctccatgaagaggctgtgccggggaagccccgggttggagtgggggtggcttggagccttggggcttcccctggagggggccggggggggcgggtagagatgaggctgggggaaggaacaagagaaaaaatatttggagttggttgtatgatgcttcttcctggaggaataagagggggtggttgtggagtcagggagtttgtggctgtgaaaaatggtatgctggagggagctgggacatcagtactgcctgggagtctggaccatgtggtgtcctgaaagagaggtcaggagggtcagactggagtagcctcttgggagctgaggatcttggatttgcaaggattttgagggtgtgattgagtgtatatgaggtgtcactgcaggggtttcaccatcagactggcgacggtggcacagatgcagtggcagttctgagaagatcctggggttgaaatggcttaatcctggccacatcctccttcctatagcccctaaatctctatcccttcagtctgaccctaaatgcaccggctgccaccctgggacacctttttagtccccttcctactcccaaccttgaggcagcctggcaggaagccagctgtgggcagccccatcctgatcacccatgtgcctcccccgctgggcacagtcacccacacatgccatgacgtggttcctgccaccccatctaagtatgggggagaggacattgtctgagtggcccctcaggtctgttttggggacattcacccagaccccagctaatgcgcgccccttcccctaaaccatttagtcttggaagctgactctgccctctgggaccttttcttccaggccactccttgctcagactccagtctcaggtgggatggtcctcagaaccgtgtgatgtgacggtggggcctgtcccaaaatacaaaccccaatgcccagtttccagtcctcttggaagcatgggcaggacaggacttaggctaggctggaggggtggtttcttttgacctctgtggggtctattaatatttgggagcactgcctgggatctggggtgataggcatctggggatggtaatcctgtccctgcgacaaataagcggggtaatctccgcttgctcagtacccacacccatcttgtgtcggtagttttgggagtgtgggaagctggcagggcccctggcaagatgaccagtgttgtcttgacttactgggttttgggaaaggagtatggcaactgataccccggctcccagggctttggctgaacattctctctgacgcctgctgtctttcctccctctactcccctctccaccctctggctgctgtctggagcccacacagtttgtggggggatgcacggtggggggcagggcctggatctccgtgtgtgtccagggagtattctgggaattggcaggattggctgagggtgtcttggtgtccccgcagggtgggcggcatgtggggacctagtgtgagaatgtgtcagcgttggtgtgtctgtccccagtctggctcgggtgtgggtgtctcgggtgtgggtgtctcttgcttcgtctggatcttgcctcccgctccagtcccgccctcccctcgctcccccctagctgggaccgcctgcttgctttccctctctccccacaactggagcctcccttgcctgttcctggaatttggagaggaggaggaggaggaagaggcaggcagacagacctcccacactctagcccgcccacctggcatcatggggaaatgaaataggtgctatggaactacattttccctggcttccctagaccctccagcacacatcatgagggccaggggccagctcttatggaaaggccatgggctgtccatccctctggccagtgacacctccttctacttaacatcctgccccaaagggcccctgctggacctccaggcaccactgtcagcctggggagccggtggggggattaggctgctgccaggctggcccgcacctgttgccaaccccagccctataactggagcttgctagggagggggctgcagaatgacaggtgtaatttctgcagctaggcaactccacccccccaactggatatgcctttcccttctgccggaacaagggaagacttccccttcgccactccaagtgtcaacctgatcttatggatgatgcccctgtcctgcctgatgacccccacccccatccctggctgcagagctgggctgccctccttcaagttttcagagctgtgctgccctggcagggctaggggtgtgggggtgtgtagatgggggtggttctctgttaatgttttaattgcctaaaaactgggagctcagctctgggccagtggggagtctgggtctggctggccgcccggtttgggctaaatatagtctgggacatctgcagagaaggggaggggggtggagggaggttccattcccccaccttcagccaaggtgccctcgtctgggcgggcaccttggagcagtgagggggattcctcaagcacaaaaggcaggggagaagtggcagggaagaggtggcaggggagaggtggcaggggctaggcacagttgggaccttgcttgcctggaggccagtagatgccggagatgaacctggaggctcaggacagggcaagagtggggcacgccggggctgggtcctctggctgttccctctccccacagagttacttgaggtcaggcagtctccatgtgtcactgtaccccgcaggcagtgtcaccgtgacccactcgctgtgtgtctgtgtgtacacacctaccttggagtggctttatcccggccctccccccggagcctctgtcccctgggtcctaccgcaggtcctcagccctccttccctctgtccctcgccctacagtgaaaccttcagcccaggaatcgagacttgagaaggggaagctgcggtggggagttctctgatctccagtcacggcaggaagtggaaaagaggggggttaagggggggacccatgagtggcaggcagggagggagagccctgtcagtcctgtgacccactgtgcagatcaaggaggggttggcccccttcctagtggtcccccttccctccagctccaggtaggagaaacctgggggacagctgattccccagggggtgcaaacaatcttcatcacccccccaacactaagaaaaaaaatgtcttcctgtcacgtggctgtcacttcctgtcccactgtggttcctgggatgtttgttgttggttgccatggtgatgtctgccgtgggcactacccctggttcttgtggggaaggagctacccctccccaccaggctgggggggtacttgggggacttgactagggggtcctttcaggctgagtgtgtgtggtctctgatgccccagattccccaggaccccccagacttctgtctgtggggaggagtcactgccacctactcagactgagtgctggggagactgtgaccgcatctggctgtgcctgaccgtggctgtgactttgtgagtctgactgattttgcagcccttgtcccctctggccggggttcctctcgctcatagagatgcccattcagggaacctctgtgctccctatctgtcctcatatacagttctggagcctgctcccatcctgtgttctgatggaaaccaccttccccagggagtttctgtggcttcctggactccaggctggagtgtcaaggggctgtggggcagggtcctaggttgcatgtgtttggggctggggaggtgggggctctgcagactatgccttcccctgcacacacagcctgcacccgcttctcccttgtctggcaggcgctcttctctaaggggaaggccatggggatctgtgacctattatccctatccacctgtgggcttccctgttcagctggggatggtgaggggaagagattccccctagttctagccccaactgagtaggcgggtgtggagtaggaagttgcttgggggggggtcaatgggtcggagggggggtatggggcagggcacagtctgactcaggcctggtctggggtcagagccaaaaggatatcctgaggcaggacttggtgggggggtgtattcctggattccctgcagcgtgggtccccagggtgggatgctgagagggggctggtaccatctagtcctgctggcagtttgccctgggactcagaatatggcatacgcagggttgggctgagctgaggggaggggtgagggctgctgcagcctatctccccaccctggccctgcctgtatctctgtaagctgtccccccattgtgagagagctgtgcttcctgcttggtagcatggaggggaggtagtggtgagggggcagctgccaaggtgtgagggtggggaaagccccgtgccaggctggatgtgaggtcggtggtttccaagctagggggtccccttttgtctgtgcccctttggtccctcacccaacagagctgcctgcgtatggtccacacatttctgtggtctggctgtggcctcagtaggctcatctcttcctcttcccattttttttttccttccctgtgggttggtccctcttcttgaggcctgaattaccccctgccctttcacctactcgttgcttggagtagggaggcttcagttctggttctacgtggacctctcagacaccctgggcttcagaggtcctgaccatgtcccccgggggatctggggtatggcccctggggatggaggagttgggagcacagccctgaccagcagagacccccacttcctcctcctagaacctggactgccccgagcttggattgtccagtcaccctttctgcctggtatccagtcactggtgagattatggcgtgtgggggtcctgcagctctgtgtagctggggaaaaaccctgggctgagtggagtacaagctgtggagacattggacctattcttttgggacaaggcactgtgtcttgaggcaatgggcagtggtagcacccggaagtgagacactaggcttcctccttcccctaactcccaagaggacatgcttatggcctgcactgactagggcagattttcaaaccagtcctagctctagcaaggctggcctggggttctgtggggttggtggggaagaggcaccctccagctatcccagccaccctcaggtgatccttctccagccctcctagggaagcctcttttaaaatgaggctgggctggccgggcgtggtggctcacgcctgtaatcccagcactttgggaggccgaggcgggcagatcaccgtgtcaggagtttgagaccagcctggtgaacatggtgaaaccccatctctactaaaaatacaaaaattagctgggcgtggtggcaggtgcctgtaaccccagctactagggaggatgaggcaggagaatcgcttgaacccgggaggcggaggttgcagtgagccgagattgcgccattgcactccagcatgtgtgacagggtgagactccatctcaaaaataaataaataaataaataaataaataaataaataaataaataaaaagaggctgggctaacctggcttcctgcagcccagaccctggtgaacagacaggaaacagaggacccgagtggccggattgtaggcttgccagggaggagaggggtgagagccttggccagaggggacccttgaaaaagcggggagtagtcatcactgctccccaacccctgtctgcagatatgaggggcgctggggaggggagaggttgtggctttgtatgtatgggagtgtgttttcctggaaagtttctaaatggttctagttttgaatctactctgttctgccctgcttggccagctcctggcgggacaggggtccaaaggcggcagggctttgtttctgccagggctagagtccctcctgcccaagttgagcttgagctctgggtgtcatttgcatatgattcactaactgtctagaatgcttaggaaacccccagtctccccttcttttaagctccccaatacttttccccttctctcagcccctctgagactgcctgacctctatttcttgggaaccgttgttttgggggagactggagaacagagagaatgaatgaggaagagaggttggggccagtcccggctgagtttggggtcccctgctcttctgtcctgagtataagggaggaaatggtctatttctcttccccttctcccctccctaaatccaaaggtttcccttttttggtttgtgaaatgaaagaagggaatttgggaatgggttgtggtcaggcctccacccacaccccgaatatccctttccccacatccctctcctccatccgagggaagcagaccctgggaaatgggtaattctccctcctggccccgtcaacagatgttgccctgggtggggtgaggcaagggaaagcaggccgactgctgaggggcaccaaggtggtggcaagaggcatggggatggagggctccagttgcccgggcctcccctgtgccaagctctggtctgggtgctttccaggacttcctgtctgaaatcgcacagctcgttgttgaggtaggcagttcacaggcgagtaaacagatgcttagagaggttaagtgacttgcgtaaggtcacccagagtggcagagctgagatttgacccttccgacttctggttctttctcccatcttcgtggctcagaaagctctcacctttttctctaggtgtgtgactctggggtgtaacgcgtgggcagctagggatgctgatgctggagaagggatcctggcaccttctgagggtgagagcggccccagtgggcaggagtgtggggctggttgcaggtgctctagccccctacccctttttctgctgtgcttaggctaggctccatatattggaggtgtgggcctgtggttttctctctctcaggggagggtgcccgtgggcagtggaggtggctggcatagggtggaggttggatgtgggtagtttgttttccctctctttggtactggtttcgattctctgccgaggccttctccacccctggggtgtagggggctggggcccaggtgtctctctgagggtcatagcttctgatggaccttctgaggcagagtctgtgcccttttgggcccaccctggtcatccctacccttgcccatccctgttctctggtctttctggcccttggcctatttctgtgacctttagccctcctgcggctcaaggccctccccagggagctgagtaaatttgcactgaaatttgcaggcagagctgggttaggctttttggaggctctgataggggtctggggaggccttccagccttgccctgtagtgtgtgtgggtggtgggctgggggtgaggtgggggtagtggggattgaagtttgattcaatttcaaactccactggggcagagttgaggtggctgtggttttctcttctctgggagcaagggtgggttccagagggtccaggctggactgactaaactggcctcccgacccccaaaggctgggtcaggatgcctgagatctggagtgatggctttctgggcctcagcgtgggttacagaggcctcactttgggttagctgccccttgggcctcaccttgagagaggcaggcctctgtggatgtgaattcacctgagtgtttgtggacctggtgcatgggctgggcccacagggaggacctcagagcatcttctggcagaagcagcaggtacaagggccaccctggctgtgtgaggttcggagaatgtacagtttgggagactgtggggctgtggttgtgtctttggggagctgtgtactggggcccatgcatgcagtttctgagctgtgttcattgtgtggtggagcccaggtgtggagagatggtatctccaggttccttctcctcacatgcatgcctgcacacacacaggctggggctgcaggcgtgctcttgcccacccagatgttttctgtagacctgcatgcatgagtttgtatgtgtatttgtgtgtgagggtccaactgtaggaactgatgaggttctgccagcctcttcttcccttgcatggctcccccagctccagttcccgttgtgtggggccccacaggagttgggagggggccagggcggcaactggtccagtgggtggggcccctgttcctctgacatcagccctctcagcctaggagggaattggcaggggcctggggtaggaagggagctctttattcaggagtgaggagagaggccctatgattgtcataatgagtaacagtaaaaatcgtggttattagcaaggtccagattttactcctggggcagcctcccctccctagcccagtacctgtcccctcccaccctctctccctcagttccacacaggctggctggctcagctgggccagaattcctggcctcttccacagtggccttggcaggaactcccccttcccaggcctggtcttcaaccaaatgctggccatgtgcttgtcccctggactccagatttgaggctagagtctggagttcagagcttggaacctagtgtagcctgagcttggggtggagtggcaaggtatagggggtgttggaaatggacagtccttattttgagtctctgtggccctgtttcttttctttctttcctcttctttttaaaacagctttattgagatataattcacataccataaaatttacccattaaagtgtacaattcagtggttttagtatattcagagttgtgcaactaccaccacaatcaattttagaacactttcatcaccccagaaagagcccccatacccagcaacagtcacttcccatattcctcaaatccacgccccagctcctggtaaccacaagtctgctttctgtctctataaatgtgcctatcctggatatttcatataaatggaatcctacaatacatggtctttgtaaccggtataatgttttcaaggaatatccatatcatagtatcagtacttcattctttttttggcagaataatgttccattgtagggacatacaacattttatttattcgtcagttgatggacttttgggttgattccactttttgactattaggaataacgctgctgtgaatgttcatgtataagtctttctgtggacttacgttgtcatatctcttgggtagatacctaggagtagaattgctgggtcatatgccatcgctgtgtttaaccttttgaggaactgccaaactgttttccaaaacagctattctattttacattcccaccagcaatatatgaggattccaatttctccacatcctcgccagtacttgttattatctgtctttcttattagagctagcctagtgggtatgaagtggtatctcattgtgctttttttttttttgagatggagtctcactctgttgcccaggctgaagtgcagtgacacaatctcggctcactgcctcccaggttcaagcaattctcgtgcatcagcctcctgagtagctgggattacaggcatgtgccaccacgcctggataacttttgtatttgtgtgtgtgtttttttttttttggagacggagtcttgctctgttacccatgctggagtgcaatggtgtgatctcagctcactgcaacctccacctccctggttcaagcgattctcctgcctcagcctcccaagtagctgggattacaggcacctgccaccatgcgcagctaattttttagtagatttttgtattttttagtagagatggggtttcggcatgttggtcaggctggtctcaaactcctgacctcaggtgatccacctgcctcagcctcccaaagtgctgggattataggtgtgagccaccgcacccaactgactttcgtatttttagtagagacaggattttgccatgttggccaggctggtcttgaactcctgacttaggtgatctacctgccttagcctcccaaagtggtgggattacaggcgtgagccaccgcccccagcctcattgtgcttttgattggccatgtttctttttgtctgtctcttttcttttgtctttcatatatgtatttttcatatataaatacatgcatatgtatttatatataacctgtacccaaaatggatttgaaacatcctcttgtcctcgtatggatatgttcttcgtgttctctctctttgctcttgttgctgcctatctgtctcactgtgttatggaatctctgggttcatctctgtctctgtctctaccccatggtattatctgtgcatatcctctggtgccagctgttcaaacagggtgtggatctgtattcacactggtgaagggggcatctggcctttcatcttctgcccacctcccaccccagttcatgtgttttgcttctgcagacagaagtatgtgggtgaaccttgagatcaatctctccttcattgcctgggggtaggaggcttcctgggcggtccttgccctcctacacatcgcctacccctggaccatccatgctgttaagcattggaggtgatacctaggagtccttggttcccattttcctattagtgtgtacgtaaatgggcctcctcccagggcctgtgggacaaacccgtctggggtgctggggcttggatctgggggggaagtggtgtaagaggggccccctggcttaggagtcatttttctgagaagtgccaatgctttagggaagcggcttttcctccccctccctcttcccccccagcacacgttctctgcatcttgacctcaggtaaccctcactgggggaaggagggccagctgcccgtttctgctgcagtgatcccttgaggtggcactgtggaccctttcccctcaggactgtgggtgagaggccctccaaggttctgggctctgtccctgtctccccagcctggctgtgctatctgccacccccagcagtgtctgggccctgcttccaggtcatctctgccagccaggcatggtgccagctgtctgctcagctgggtgccacgggaaaatctccggcagcccaggttggggagctccacggggaatgcctgtgtgcctgttcttcagtgcccactcacctgtctttcttttttctgcagcatcacaggacatggccccctcagccacctagctggggcccatctaggagtggcatcttttttggtgccctgaaggccagctctggaccttcccaggaaaagtgccagctcacagaactgcttgaccaaaggaccggctcttgagacatcccccaacccacctggcccccagctagggtgggggctccaggagactgagattagcctgccctctttggacagcagctccaggacagggcgggtgggctgaccacccaaaccccatctgggcccaggccccatgccccgaggaggggtggtctgaagcccaccagagccccctgccagactgtctgcctcccttctgactgtggccgcttggcatggccagcaacagcagctcctgcccgacacctgggggcgggcacctcaatgggtacccggtgcctccctacgccttcttcttcccccctatgctgggtggactctccccgccaggcgctctgaccactctccagcaccagcttccagttagtggatatagcacaccatccccagccagtaagtctgggtgtgggggctggggtgggaagggactgtggagggtggcaggcctcagagcttgggctctgggcacgtctgttctgctgtgagtggaaggcacggtgagcgacaaggtcttctccagttggggtgaccatcatttgaggtcttaaaaatgaaagccctatggcctataggctgatcatggtggttgtgtttgaagttgggggtggcagagggggagatgaaaccatgctgttctggcctgcagtggccctcgcacccctcttctgtgctctgctgttggggccttataaatagctccaaggactggacacacaggttggaggtgggtaaacaaacctcttgacatttgatggaaatggcagctctacctagagtgagagcagcacaccacctacgccccacccccactcagtgcctctgagggaaagggcttgaaggagcagaccgaggaaggctggctggaaccccacctctccccctgccagctccacccccggccatgctaggatgtgcttccctttgtggggaggatgagagggaggggcccacggtctagctgggtggatagggtgagtgtcccaggaggggacacttggcctggactctggcctcggacgcatgcatggtcttggcagggcctgtgttttccttgcctccaccctctgccatggaggtcacttgttggctgggcaggggtctcagtacccttcgccggctggccgagccaggtagtgggaggtggcggcagctctggccagctggcagagtccagggctggggcctgccaggccgcttacagtaactctggcccccagggcccagctgggcgccaggccagggctggggggaggagggagccggggcctggcctgggacgggagagggtggaagcagcagaatgggccatgggctgctggctggccggctggtcagctgctgacctgggaaacgtgtccccacctctcctggccagcagggactgcacaccttgccctgtgcacccaccacccctctcacggctgctggcaagctgcctggcaccactgccctatgtgcctggctgggctgggtcagtgcccccttctcagtgtgggggcagcgctctctccccggagccagggagtctctttgtccctggggcaggccctggctgggcgcctcactgcccgcactggctgggtgcccaccaccaccactgcttcctggatcgcctcctctggcttagctgtggccccctccctcccaggctccaccagccaccaggagcagggactctatgtctgtgtttctttgtgttccccgccctttatgccctggggccagggggcaggcaggtgctgcctcagtttctcctgccaccccttatcaaaccttcatcttctgtttctgctgtctcttctctccacctcatataggagtatgggatggatggagtctggggactctgattctggtctggtcctatagtctgtgttagtgatggggagaggccagcctctggggtttggggctactagggaatgcattggtgtatctttgtagaatattcactgcatttaaagggactgtgatttacattctggacttggatcactggaactagaagactgtctgcttcctgacagggtagggttttatttttatttatttatttatttttttgagacagagtcttgctctgtcaccgaggctggagtgcagtggtgcgatctcggctcactgcaacttccgccttccggaatcaagcaactcttccgcttcggcctcccatgtagctgggactacaggcgtacgccaccatgcccggctacttttggtatttttagtagagacgggatttctccatattggccagggtggtcttgaactcctgacctcatgatccgcccgccttggcctcccaaagtgctaggattataggcatgagccaacgcgcctggccatttttatgttttaagacagggtcttcctctgttgcccaggctggagtgcagtggcaccatcttggcttaatgcagtctcggcctcccagcgattctcatgcctcatcccgagtagctgtgattacaggtgcgtgtcaccacacctagctaattttttttgtatttttagtagagatggggttttgccatgttggccaggccagtcttggactcctggcctcaagtcatctgcccgcctcagcctcccaaagtgttgggattacaggcatgagccactgtgcctggctttctttcttttttttttttctcatagggtctcactctgtctcccaggctggagtgcagtggcatgatcatagctcagtgcaggcttgaactcttgggctcaaggcgttctactgcctcagcctctcgagtagctgggactacaggtgcgtgccaccacaccaggctgattttttgatttttcatagagacaaggtctcaccatgttgcccaggctggtctcaaactcctgagctcaagcagtcctcctatcttggcctcccaaagtgctggagatatgggcatgtaccactgcacccagctcagggtaggatttttgacgggggaggagttagggacctgcgacctggtgcctgtggacaacttgtcctaacccaggtgatggcaacagagttcccagacactctgtccatctggagcctgggctcattggagggttggaggtgggggctggggcctggccccatccttgcccatcctggccagagggagcaaatgctttgccttcccctcccctcaatgttgcaagcttcttcctctttcttagaggtgggtggggaaggcttcccatcctggtaaccttctccccaaatgtgggtggggtgcccacatttcaggcaagtgtagccttcttcggctttctccacccaggttaggcaatgcccccttcctgccccctccctctgtgagccttttggtttccctgcccctcccctctccctagtaaacaacaacaacttctctccctgcccagacccttagcttctgagcttctcactgaccttcctcttctctgggacaaggtgtggccatgggtctgagggagcctggcatctccctccttctgcagagccagggctgcctggtggacagagctcctgagctctgagtaggaaagcatggcagataaaattatcacatgcctggcctcagagatggaggcagtttagccttccctgcttgcctggccttagggctggtgctgagggtgaggcagttcccaggagaggtggcaatccatggtcctccattcctgcaggagcagtggtatgccccagtctgcccataccctttttgtaggaattcttgctgatgaggcttcctactcccattccccatccaacaaaggtgttgggtccctcctccccctcatccctttccccaggtggggaggaggcagcacattaggtggcctgggtgcgcccttcagagacctagtagcctatgggaccaacagaaaccctctccaggtcactgtggggagggctgtgtatttgttctgctacagccagggtgggagccctagagatggtccggcgattctccccgccccctaaactggcccctggggcttggtctctgaagactggtgtttactgtggaggtctcagattctgtgtgcactacgggtcagggctgtgtgtgttttgggggtggggtcacggttgggtgtgtgttgggaaggggattaatgacttgtgtgtattgggtgagagggttagagagctgagtgtgttttgggggaattaaatccagagctaaggagggagagtcagcctgtctgtgtgttggtgttggggctgggagggggagtgacttagggcacagagtgtttaaagaggagtggtctttcgtttgggttcttaacctttcttggctggaggggagaactgatctgcctttttttgttcaccctgggaattccatgggcaaaggggtctgactgggggctgtggagtaggcatttagtgctgagtttaaaacttggacactgggctgggcgtggtgactcatgcctgtaatcccagcactttggcaggccaaggcgggcggatgacctgaggtcaggagtttgagaccagcctggccaacatggtgaaaccccatctctactaaaaatacaaaaattaggcaggcgaggtggcacgtgtctgtaatcccagctactcgggaggctgaggctagagaatcgcttgaacccaggaggcagaggttgcagtaaaccgagatcatgccactgcactccagcctgggggatagagcgagcctctgtctccgaaaaaaaaagataataaaataaaacttaagacactggctgcgtgcagtggcgcctgcctgtaatcccagcacttttggaggctgaggtagggacttcagcccaggaatttgagacaagcctggacaacatagtgagaccctgcctctaccaaagagaagaaattagccaggtgtggtagcgtgtgcctatagtctcagctactcgggaggctgaggtgggaggattgcatgagcctgagaggttgaggctgcagtgagctatgatcacgccactgcactccagcctggtgggtgacagagcaagaccctgtctcaaaaacaacaacaacttggacatttatgtcacatacaacttgctgataacctctctgagcatgtttcttttttgttgttgtttgttttgagacggagtcctgctctgtcgcccaggctggagtacagtggtgcaatctctcagctcactgaaaccctctgcctccaggttcaagcgattctcttgccacagcctcctgagtagctgggattacaggcgcccgccactatgctggactaatttttttgtatttttagtagagatggggttcctccttattaggctggtcttgaactcctgacctcaggtgatccgcccacctcggcatcccaaagtgctgggattacaggtgtgagccactgcacctggccaaagacatttattcatttatttatttatttgttttagacagagtctagctctgttagccaggctggagtgcagtggcacgatcttggctcaccgcaacctctgcctcccaggttcaagccattctcctgtagcctcccaagtagctgggactacagatgcatgccaccatgcccggctaattttttgtatttttagtggagatggagtttcaccatgttagccaggatggtctcgatctcctgacctcccaatccgcctgcctcggcctcccaaagtgctgggattacaggcatgagccaccgcgcccggcttgttgttatttttttgttttgtttttgagacggagtctcattctgtcacccgggctggagtgcagtggctcgatctcggttcactgcaacctttgcctcccgggctcaagcgattctcctgcctcagcctcccaagtagctgggactacaggcgtgtgccgctacgcccagctaatttttgtatttttagtagaggtggggtttcaccatgttggttggccaggatggtctccatctcttgaccttgtgatccgcccgcctcggcctcctaaagtgctgggattacaggcatcagccactgtgcctggccgtgacccagaccctttgtaggtgggagctggagagaatgggatgctaacatctatagagcacctactgtgtgtcaggggctttgtctgtgttttacaaattttaatccctgcaatcctggaagagggacattatccccacttacacagaggacacagtgctgggggaggttaaagtactgcagaatcatgactgtaggattgtaaagctgggctgttttccaccatctacataggcagctttgagagtggattgtggggcacactcttgggtgtgggaagtgtggggggtggggcttagtgctgactgaaacccccttccccactgtagaggccctttctctgccttagaacctacctttccccggtagggggtgtagggaaggcccaagccataccccctcctctctgttttggatcctgaaggctggagagaaagaaagataaggggcctgggccagatctccatcctgtcctggaagctgtggatacaatctgttcacaccatccccacccccaaatctgcccgctgtagcccacgggagtttgcagaactcagcgggcaccctccccccgatctccagacactgaaggaacagaatgtaaaagccacagttcttattcttaatttgtttcaatttgtggatggaggcaaagaagttgcaagccatcaacagaggagccggggatgggagccccaaaagggtggctgcatgtttgcttcgtgtgcctagagactggggaatgcccgagggtctgggtgagccccagcagaaggcagaaaggaggaggttgtgtccttcccttcttcctatcctctgccacttcctcgctgttgcagtctgtgcatactgcctccttccctgcttcccactctttccctggacaataggagggacagcccaggcggagggacagcccaggcagagggacagcccaggtggagggagtgctgcctagcaatgcctttcttggagtccgaaatgtagagtcagacaaaagaacatgacatggagtttttaatgaaaatggggtccctcaccttttatctcccagcaaggataatgcacaggttccctctggacaagatcccagcatagacgcggggagggaactcagggaaggaagcccgtcttccttttaggtgggtcagggccgaggtattgtgtctaccccatgccaagggatgtgttgcttatggggctgtaccagtgcaggcctgcctgccctttgagggagtagtgtctgtgggaagaggaagtggtttccatctctaagtcattttggggcagtgccttcttcctcctcctcctctgtggagttggggcacagcgagggattgggcctcccagggttgactggaggccactcaacctttggctgtcagaaatagaggtgctcccctccccattttgacttctgggttgctggaaacctcaaccagcccacagaccaagggccttccatgggcaggagtcttaaaggacagttcttcctgtgtggccttgggcaggtcacccaagctctctccaaatctgtttcctcctccttaaagcaagacttctggctgggcacggtggctcacacctataatcccagctactcgggaggctgaggcaggagaatcacttgaacccggaggtggaggttgtagtgagccgagatcgcgccattgcactccagcccgggtaacagagcaagacttggactcaaaaaaaaaaaaaaaaaaaaagcgtgggcacggtggctcatgcctgtaatcccagcactttgggaggccgaggtgggaggattgcttgagctcaggagttcaagaccagccttggcaagatagcgaaatagcgaaaccccatctctacagaatataccaaaattagctgggcatgctggtgcacacctgtaatcccagctacttgggaggctgaggcatgagaattgcttgaatccgggaggtggaggctgcagtgggctgagatcacaccactgcactctagcctgggtgacagaacgagactctgtctcaaataaataaataaaaataaaaaaatagagcaaaacttctaatctctccttggctgggcgagttgccgttaggccacggtcgcctgcttcctgctgaggcccttggtgagtttcacgtacccagcaaggctgtgatagtgaggggcagggtagagctgggtactgtcttgggggatggtgccactctatactgggagccagtgtccacctggcactgggcctcatgatttcctgtttgttgtcccctccagatggggttggggacaggagggggccctgcctggcacaagtgggggccagtttggcctgcacctgctgagggcttactaaacgcaaagccctgagaaggagctgagggagggataaggctgagcaggatggggccccaggcctgcagacagctgccgctggaggccccccagccccagctgcgggccagagccttccttgtttcccacttctcccactgccccaggacactgtgttctgctctgacctgccccatgaccttgctgttgcccagaacgggcctcttgccctagcttctcctctccagctccggaaatcctatctatccttcaaggaacatcttgaatgccgcctcttcccagaaatcttcacagatgttcccccttgcttgccacactctgcctccctacttagaatgcctgtgggtccttatttattttttaacaacactcatctcgctacccagaagttgcttctcccctgttcctgccatgagctgtaaccatttgggacatcttttcctgaccacaaggtctttgatggcagggacagagtctcaggtcccttagcgccttgcagctgtgagcgcagagccttgctccatcatttgaaagatcccgaaggcatggaagcactctgtcctcttcgccattagtctcatccactgtcaagatttgcatacctgcccccagaccccagcattccatctgtagccctgactgcacttcagggccccacatccacctgtccagcagcccagtggacttctctgctttgcagtctcaggaacttcactgatgcgtaagtcacacacaagtctctttgctacctcttttcccataccccttacccccacccccccacgttatttgtacctttaaaatgtttattgaatccaccttcctctgtccatcagcacttccagtttcctaggccaagccacccttgtctgatgcctggactgctgcagtagcttttacctggtctctcttgccctcctataatccattcttcacacaactactggaaagatctttttacactgtaaatctgatctttcctttgcttggaacctttctatggcttttccttgcatttaggataaaatccaaaagccttactgaggcctataagcccccctggtctggcctgagcccacctctctagcctggtcttgtgtaccttttccttttgaattttgtgccccatgattctagccttctgccagttccttcaatgaactcatcaactgctgtaaccccagggcctttgcacagactcgccctttaactggaactacactcctttctactctttgcctgattaacttacaaactttctcttatggtaggtctgttttatttgagttcttccctaatttagttaaacctaaattaggtacctatgttaattcttcagagcataatagcatttatctcagtttgcaattgtgtgtgcatacagtgattatttgcttaatggctgttgctccctaaggtctacaagggcaggttccccagggtgtccacatagaaggtgctcagaaaaataccttgaattggcctagcttggtaagaacatgggctttggcagcaggaagttcaaatacctgctctactctttattattagtaatgtgatcttggacaacccacatagccttgctgagacctgttttatttgtaaaacatctcttggagttgctgtgaggataaaatgacaacatatataaagagccaggcttcttctagaagaatgtccttgggtagcatgtacatttccatccttccttttagagagtgggggtaataggataccccctcctccaggggtatcccctctttctagggacctacccaagctaggcctttcttccagtgaaacgtgcatcccgagggcttctaggatgaagtagtccactggaaggcaccagctcttccttttatctctccagagctggacagtgcaccaggggccggtactggttccccagctaggagacaccttgggcggggctttgctcgccggaagcacgcagagcgtggggaggagggccccctctgcctgtgtttgtgccaacagcacccgcgctgccgcgtcgggttccggcggccggagtcacacatgatgtcacagacaatgacacaagccggtgtctcattccgacacagcgtccgagctgcacaatgtcacacccgggtgccaaacacttggccccgcgcgacccggccctacgcctcctgccgccgctctccgcgtctccgggggaggtggcccggttcggccgggcagggggctggcgggcgagccccgcgggcgggctggcgagcgggtgatgtcacgggcagcggtgggtgggtcactcggaggtgaggcgccgccaggcgagttcagcgagagttcagccgcattgcattaggcaaatgaggcccggcctgggtgggggtgtgtgttaaggggaggacaccgggaccacccccctcttccccgccccaccacctcctccaccacggcttcgctcggccagggactgaccaaaccttgggggagcctgggagccggaactggtacaagggaggacgcccgcccctcttccgtccttgtcccctcgcagccccctcctctccctgtactcggcgtccctctgtactctgtgtactcctcatctggagcctttcccccttcctgcttctctcctctcctcccccttcccaggctgcccccacttgcctgtccacatgccgcctctccctctcggttccctgcgtttctcccgctgcagccggacgcgccgggaatgggttaagccaggggcggtgcctggacggggcggggcggtggaaagggggtggtgcccggaggggagggggcgcgcagagctggggtgggggggccgtggcgcgtaccaccagagaccgagcgagtcgccagctgcccctggcctggcgggggcggaaccgcgcgggatccccacccccacccggaatcctcgccacggagaatccctggagaagccccggatccccggctgggaggaggaagtgctcgttgacccccagccccgcgctgatcccgcccccggcctgcggacttggggagccgctgtactctgcctcggacgccacgagactctagacgggagtcccctcgaggtgaagccgctgagttcccgggccccgccaggcttccctgggagagccgacggaccccccctcccagcacacacaacttccctgcttttcaccgggactggcggagcggccggcggacttagacgcggggacttcagggcagggggcgccccctgcccgggtcaccagtcggggcgaggggacgtctcctctcccccagctgctctgctcggatggcgccgccggctgagtgacgggggcggcgcgcaggacttcccagctcggacctcttgccttcgaggggaaagatgtacgagagtgtagaagtggggggtcccacccctaatcccttcctagtggtggatttttataaccagaaccgggcctgtttgctcccagagaaggggctccccgccccgggtccgtactccaccccgctccggactccgctttggaatggctcaaaccactgtacgtaccggcctctcagtctgctgttgtagggggtgggagtgggcggtagggcttccactactactcgggggtgagagtcccggggtgtagtggaggtcctgtctctacctttcacttaacccgtgttgcccttgctggacaattgaaccctcccggccgcaccctccccccagtaaccctaagtgcaatttgtgttagattagggctgaggaactttgagagttccttctttcaagcaacattccttcatctcttgtttcacttcttccaggagaaatgaagcccaagccccttgcccccagtttatatcttcttgcctggaatccaacagcttcacagcaggctggagggtggggtaaaggtcctgtctgtgtgggtttgtctgctcccgggggaaggcccccccgccagatcccacttgccaaagcccgagggagagccccttcctgtgcgacagctgctgcccccagcccttgctcttgcgtcattagagtgggtgtcaggggagcactcagtgtctttggtattgacagtggggtgtggcagaaaggggcaacttcatcagacacccgtctgccatcctaaccttccatcttggcaaggggcactgggtccttatggggttgttgtcctggccccagacacttggctgtcatctttgaggctttcatccccaggagtggaggggagaagctgctctggtgagaagaatccctctccccctaatcctaatccggtttgttctctggggaatgagtttgtttttgtgggtctggggctgctctggaaatgaggactgcatcccttcccagctccgccaccgagtccttttgttaccctgacttcacttggggatagggccaggtcctgggctgtgccttcctaagaggggcactgatgagaatcctagcatcctggcagcctggtcactttctctccttgttgccccctgcctgggtgcaggctcctctgggaggaagggctctgtgcacactcaggagctcggagcaccagggtgtacacctgggcattttcctgcgcagctgtgaggcagtgtacactgggtgggcgggagcaggcgcaagggggttattgttagatggctcaggtttcttcccctcctgggctttgggctctttgctggaggggaagctcttccgtggaggatctcccaccttcctggacctgctgcctccctcctgcctgccagggaggaggggtggagtgggtctcgggggggccctggcagattggagaaggttgaagggcaaaggacttaccccacccctcttgctgggagaagagagacctgagatggacagacagcccacctctgccctcccagagccacttctatcccagcttttcctattgtcctgcccccgaccatttcctctagggccgaatctgctgtgtggctgtagacacaagagggaaggtatcacccttgactttggaagaagagagagtgagaggatgactctaggaccctttttctcattctcccagtgctggagcaagacccccctcccctagggggatagttggagcagggctgccagagtcaccccttccactgccttggccaccttctccagagggctggagagaagctgggatctgagaccttggtctccagcccctgtctcttcttagcccatggggacagctcagctcttcctggcccagaactggagagggaggaggatcacagagagtaggacaggcagtgtattggtgagcccttcccctaaaccactggacatggggaagtggagacctgtccccacatccattctggggtggggtagtagacctagaggcctgggtttccagttcccgtagtctgagcgtgggtgtgcatatataagtgagtgaggtgtcagtggactcgggtcctgaggctgtgaggttgggagtgatgggggtctgggggcttgccttgaggcacaggaaggacccggagtctgagggtggcaactagactcagtctagaatatgtggggccaatgccaccaccttggaagggtccccttgggtgtgtggaagtccgctggtgactggagctgcctccagccccctcttggggaattctccactctcccctttactgccactgaaggtgggaagagcaggttggctctgggaggaggtggcctgggttctgcagggccctagggacattgcctccctccccagagccctcatttcggtgcattagaggacaaggggggtgcacaggatgtggctccccatctgtctcccaccaatctccgccactcacacctccgcccgctcccagacgtccaagaatgtgaagcacgtggatgcccgtagttgggggagggggagacgcttatcaggcggccgctgggctaggggccttcttccgctgccgcggtacacccagagctacccccgcctctccccgggaggaggaaggacggtacagagggccctacgccccctccccaaccatccccaggggctgcgaggggagctgcggaggagcgggcgccagctggattgggaggggagccgctggccgggggcccggctgatttcctgctgatctcctccaggaaaccggccccttgtgcgagcctgcgaacggctcgggggcgtggggaatccggagtggagcgctctgcgccgcccgccctgccaggatggggagcgagggaggggcaccctggcagcgtcggcgggaggggacgcctggcttcctgggtcagttccagtcctctgttgggcgctggaactttgagctgagaaggtgtggtccttctctagcccgagtccttctgcaggaagaggagagattggtgggctgggcctctggggagggaggttagcagggatgggccaggcccgggcagtccctcccccgttggtgtccctccccactccacctgtgtgtgcagggagttatggccgtgtcctaactcttgcagaggctgtgaggattccggagttccccacacctccggccttggtccttgtacctcacctccttggactgctggctggaggcctggggaggtggggcatcgagctctgggttcaaagggcagagcagggaaacctcagagctgggttacctgggtgacaggtggggatgtgctggaggtagggggcaggctatgttacagcctccaaggcagtcaagctgccgttgggtgggctaaaaggaggccttgcccagcctaaactgtagtccttgcctctggtcatctctcccattctgccaaaaaataattttaaaaagcacattctctcagttccgtaaacaccctctgttggactttgctttagctccatgtttttatggctttttgccctctagtctgtcccaggccttagagctgtttacctctcatcctggtatcccccatgactccccataccctagctcccctcgtgacatcccgctctgtacccccaaagctccctcagtcctttctccctctccagtctggttcattttagaagtggggccttgggagaggcggggcccagggcaaacggtggattaggaggggtggggaggtcagtgccttcttcctctgcttgtcggaatgctgaccaagattctaggccatggtccccccaaccctccacatacccccttgcccttgatctcccctccccccaccagtctggattgtctattgttactgcttttacgtcttggaaaaagttagcacaacaaagggctgctttgtggctcaccccctctgcctcctggcctcacccaggccccccaaccccgcccccccagcagctgttctcaggcctctcagcctgtctgatttgcttgtctggcctggggagaatgaggtgggagaaaaccaggccagggcagttggtgttggagtgaagagcagacggcggtggggaggtcaggagagaatctgctgggctggggatggtgtgggcatcaactgtcccattgctgcaggctggtcttggggcagggaaggggatggggggccatagcagtgctggtcagccaggctggcctgggaagtggtgcccaggcactactaagagccaggaaagccctgccaaggttgttggcctagttccctgtcatcagccgcctagcagcccccactgtgtctgcaggtaaggggggagggtggtagcacatagtcagcccctggtgttcccatgcttccttcctctgtgccccaattttagggccatgtgatttggggctatgtgactcatgtctgtaaggtgcttgggccaggagctgtgggcacctttaaatgccagccagtctcatgtgccggagtttggggtagggctaggtaggattgtggaatatgggaggaggcagggatctgtctacctagggaggcatcctcatccatccttggccctggacaagagaacttgaacgttggtaggggcctcaggacgatgctgcgtggccccttgggaatctgggattgtcctggtcatagttcttatcttgcacccaacacccttagctgcccaggctttggacatggatagcccctacccaacccagccctgttctgcctacagtgatgggcatggagccagacactggggaggatttggccagtgagggctgcccctgctgtctgggtcacccctcctggctgccctcttggagctgaataacagaaggggaggggttagtaacccggacatagtattgaggccagacagacagagcattgatgggaacagaccccctttgtcatgccatctctccccagatggggggtacccagaataatgggcttttggggccctggggactcttctccctgtattcagggtatctccccctatctcagggagacacctcctactgtgcccagcatttgtgactcttctttgcaccccctgccttgggtccctggccctgggattgtttgggtggaggaggggcagtggctgctggcagaatggggtggaggggggagcggaagcagagggggcgggggagtggccggctttgaatatcctgttgaccccagtttcctctgcccccagcttatgtcctcttccctccctcctcttcaagcgttaactccttcctaactcggggggagaacggggccaggccgcccaggggcaagagctttagaatcagggtgacccccacccctactccccaagcacagtcacggcacacatacaaatgtgatggtttatcattgtatctttgtggttttgaaggtgggggtcctaggagtccagaggagtgatggggtgctggaggcttcattggcagcctcctgccctgagtctggctggggagtcccagttttcttaagacttgaatcctgccagcagtggtgaggctgggagaggctcttaggagggacggtgaggcagggtggagcttggtactaaggatggcgacctaggtctctaactgcccctcccctcttctctctctagccattgagacccagagcagcagttctgaagagatagtgcccagccctccctcgccaccccctctaccccgcatctacaagccttgctttgtctgtcaggacaagtcctcaggctaccactatggggtcagcgcctgtgagggctgcaaggtgagttgaaggggtcattgggaaggacagcttgatgaggtcaatgggatgtccccacttctgtgtcctgggagtgtgcagttggggggtgtccctgaagttgctgctcttctttctctgtggaagttggcagcaagcagggacacctaccacagtttccccacaggtcctcccccataaatgtgcagggctccctcaaaccagaggtcccctcctgcctcagctcctttccctgtctctatcctccagctggcagggcgtacgcctgctctgccaccgctgcccaggttgccatggtgagctggctgccgactggctcttggctggggacccaggaggcctcccccggcggccctgcctgaacctcaccatggcagcctggcaggaggcagttaggagcaggcaccctgccttagcttccccttcaggtgcccgggctgtgggctccccagtgtctggctggatttccccatcctcacgttaggtgccagggtgcaggtatacctggtccttagcagccctgcgcccggcttctcctcctttccctggggcctgagcctctgtgtgcgtttcttcctccagagattggggctcagaatcttcacagctttgggccttgcagctctgggctgctcttcagcctggagtagctatccccagatgtgggacggaggtcaagggcaaagcacaaggactcaggctgtgtgtctgcctgtcctgtctggttgttcctggtctgttcttcctctgtccgcctgtccctctggtcagcctgtatgtggagcccctggccagcctgggtctgtgtctgtgatgggtcggtgcacacctgtcttggtgaactcacatctttctgccttgctcctgagtgcatgtgtgtgttcgcctccatttctctggccagcccgtgtatctgcctcctggcctcttcgggcttgtcttcttttcctgtgttctgagttcaggggtgtgggttccagatccctggctgttgcccagttagccccatgtcttcctatttctgactcaccagcagccctgaggtcttttccctggaagggaggagtcaggtgtgtgctgtgggttgggggaagactcctgcccatcctgcagtgttgaggcaggtactgggattctcctgaggaggatccttttaggtgaatcattctccccagcttttctggcctgctcaggtaggcgatgggcaaacgcttgggggcagcagctggcctggccctcctcccctagactgagaccgtagccaggcactgctcccactgtgggtgtggacaacctgactccctcccctccatacccagggcttcttccgccgcagcatccagaagaacatggtgtacacgtgtcaccgggacaagaactgcatcatcaacaaggtgacccggaaccgctgccagtactgccgactgcagaagtgctttgaagtgggcatgtccaaggagtgtgagtgccatagggcaggggccgagtcccgcctcagttggggtctcagatgctcctaaagaccaagggagcagggctctgtggatgtttgtgcacatgcatgaacacgcatgccgtggtgtgcgggctcacggttgaggatggtttgtgtgtagctgcaaggacctgtttgcgagtctggctggctgtgtgtccacgggcaggtctgtgctccgggaccgtgtatgtgtaaccattcctgtttctgcacgtctggctgtgtgtgcttgcgtatgtgtgtgtgtgtgcatgctccaggatggctttcttccaggccgtgcttggttttggggtggggctcagaggcataggcagtcccttctgattgtgagtcttaggggaggggcttgaattctgaggggtgcttggctggacttatgtgtgtatgggggggtggaagggctggcacaaggatccaaaagccattgtctagttaagcctgggattcagagttggaagaaagaattgggacttctcagatcccagaggaaacggggtttccactttgggctcagctgaggcctgatggagggagggagggaaaggctggacagggagaccctcttgtgttgaatcatgggtgttgccatggtgaccggtgattgatgatgtcagagataaatgacgctgacagacgcctccttgtctgcgtggccgttgccatggagcctgagccttgggggatgggatgggggagggggctgcaggaccccctagccctttgtggggagggcagtggggagggggcacgggtgagatggttctgactgttgcacgaagagccccagacaggaatggaggggactggagtgtcctgccacaggaggctgggggtgccttgtcctgagcccaggaagtggctcctgctgcaagagtgggtgacaactcaagacccacaagcctggaacccttcgcttaagggctgtcacctcctcctctctgtttgtgccaccttctgctcttttcatggcagaaggaccagggaggggaccccttctccctcccaccgccaactccccttctccctcccaccgccaactccccctctcccggctgctctgtgccccggagctgagcagctgccatttcaatagaattaaagcttccgaatgataaacgtcttgtcacagctgcaattttctcttcccaaattatccccccactctccctctccctctcccttctctcccctgcactttattgaatttgcagaatcgacatgagtgatctccaaattatgccagctacccccacctcgctaccccctccctgagcccctcccccaccctcccttcctcccgcgtcagcagccaccaccaccagccctgtgagtgattgtgtgtctggataatcggctggtaacgaccccatcgcttctttaaagccgagtggtgtgtgcggctcagcgcccctggtgatttgtcagctccccagctaatgggccaagagattctccccgccaggtcccccactctcaggctggggagccctactccccacttgccccaggagctgctcagagccagtcccaagggacccccagggagactgcagctgggagggctgggtgagtggaggcgggagaaggaccttcctggggaaagaggaggcagagcacctaggagggcaccgtcgcctggagtgtgagctggagtagacgcgtgggggatagcatgcggctggctatggggtggggtggggggtgtgtgcagggccacagctgtgctcatggggcttctggggcagaacttgatgtgtgggttgggtgggcatggagggctggagtgcgtggcaatgccttgcctgcccgtgaacgcgtgctgtgtgcgcgtgcttacaagcctgggtgacctcctcagcagctggcagctctctgtcaggctgggggtggacgaggccctgagcagcctgcagctgccctcttaaccccctctgccctccacagctgtgagaaacgaccgaaacaagaagaagaaggaggtgcccaagcccgagtgctctgagagctacacgctgacgccggaggtgggggagctcattgagaaggtgcgcaaagcgcaccaggaaaccttccctgccctctgccagctgggcaaatacactacggtatggctttcccccggcctgcagggtgggatttgcccagggccacagggccaggatgggcccctctcaggcaccccttcttgtgccaggcaagatctctgcgtccttcccttcccctctcttctccctcctcctgctgcctcttcccaaggagctcccaggaagtgaaggctgggtagagggcaggcctgtgggggctggagccaggctgagaaggggtgccatggagaagaaggccctcactctccctcctcccccagaacaacagctcagaacaacgtgtctctctggacattgacctctgggacaagttcagtgaactctccaccaagtgcatcattaagactgtggagttcgccaagcagctgcccggcttcaccaccctcaccatcgccgaccagatcaccctcctcaaggctgcctgcctggacatcctggtgagggtctgcaccctggcccccaggcactgcccctgtgtcctgggtagatgtccttccagccagacagccaccctcctaaatgtctgtctgcaatcaacctgtccaaatgcccaccgcccaaatgtctgcccttcctctccccatatgtccacctgtccactcgtctccctgtccactcagccacctagcagccagatgtgcaggagctcacctgttcacccatacacatatccagccacccagccatccatccatttagccagtaataaagattcacgtaggagccaggtgcagtggctcatacctgtaatcccagcactttgggaggccgagcgaggcaggaggatcacttgaggctggaagttcaagaccaccctgggcaacatagtgagaccttatttctgcaaaaaactaaaaagattcacctaggatcctctggccagtgttcgagctgggtgtcaggaacccagcggtgaatgcaccaccatcccctctcttgaaaaccttccatgtgaggcaagagataagtcaacagaggttgcaaaactgtgatcaatgcttcctggagattgggggagggcttgtgactgcttgggcctgaaggatgatgtctcagaggaggtgacatctaggggtttgtagagggggaggtgagagggtagccctaactcaggagcaggaagtgaaagacttgctgctgtgaggccatgctgagctcaggggactgccgggcactcggtgaggtgagcccgagggtagactgggctggaggctggatgcagggggtgggggcaggaagaggtggtgggaactgccaaagcctaggctggagggagcactctccttcctgctgtccctgacaagggctcggtccacctgttccctcttggtcacctccagggtggggaacctgggatttgacgagactgtcatttctttttatgtttttcttttttgagatggagtttcactcttgtcacccaggctggagtgcagtagtatgatcttggctcactgcagcctgcaactgctgcctcccgggttcaagcgattctcctgcctcagcctcctgagtagctgggattacaggcacccgccaccacacccggctaatttttgtatttttgtagagacggggtttcaccatgttggccaggccggtctcgaactcctgacctcaggtgatcctcccgcgtgagccggcagactgtcatttctccatgggcacctctgaatgttgaggcgggtgatgggtgggaggtttagattgtgctgcctgcaggggctcccatccccatgccgtggatgcaggaggtgccgtctgggttcctgcaaccacattcaagccaatacacatttactgagcgcttgttgtgtacctcatcctgggagctgtaggcagcagcccagtgttccttagctcctagaaattctaggtcccctctacattctttgcatgtaggcaggatgacctggacctgcactatccagtacagtagctgctcaccacatgtgactctttaaatttaaattaattaaaattaaactcaattcagttcctcagttgcattagccacatttcaagtactcagtagacgcatgtggctggtggctgaggtatggatggtgcagacgtagaacctttccatcattgtagaaaattctatcagacagcattgctccggccacctgccaggtggtcctccgggagtgctggtgcggagtgctggtgccgagtgctcagagtgggttcgggttcagtccctgaacccaagcatcctctgcacccagatcctgcggatctgcacgcggtacacgcccgagcaggacaccatgaccttctcggacgggctgaccctgaaccggacccagatgcacaacgctggcttcggccccctcaccgacctggtctttgccttcgccaaccagctgctgcccctggagatggatgatgcggagacggggctgctcagcgccatctgcctcatctgcggaggtgggcagggggcctgggtctgggggctgggctgggacgggggtgcagccctggagtctcttccagggagctctttcaggccacctctgttaggtatctctagagggcagggtctggtctgcaactacacagcaagggggccatgtggggcctggactcctgttcccgatttctgggcaacaccccttctagggaggttaagagtgagggtttgagggtcggaccaaccagggtcacctcctggccgatgcatgaccctgagcaggttgctgaacttctctgggcctccgtttctgtacagtgggggcggtaacggtctctagctcatgaagttgatgggaggattacggtggtaacagatactgtgcaggtgcccagagcgagctccagtgcttgttagttgctattttattgttgtgatttctgccatttcatctggtttccagaataacaggggggagtgggagcctgcctgggaaccctctccctgcttgaggatggcactgcccatttggggtcccatcccactaactgggctcagggagggtttggggcaccccctcaccctcagctcccgttgctcccttttaagggcctctgtaccctgcggcagcagagaccccatgccctgccctgtgtggggaggcgcctgcgagctgccctcctccatggcctgggcaggcacgccccccggtggccgaggctgggggtgcagctgtgttcccagctgctcagggggtggttctgcttcctcagaccgccaggacctggagcagccggaccgggtggacatgctgcaggagccgctgctggaggcgctaaaggtctacgtgcggaagcggaggcccagccgcccccacatgttccccaagatgctaatgaagattactgacctgcgaagcatcagcgccaagggtgaggctcacagacctggaggggtaccggcccccgacacctggcccaggcccccacatccaagccagcaccccatgtctttgtgccaggacaatacgacacctgtccccatctgtgtctaggctgaggtcccctagtgactccactttgccgaggtggcccgcctgtgtcacctttgtgtggtagttcagatcgtggctctggaaccagacacgtgggtgtgtgtccttgtgtgggtcactcaacagctcctagctacagtttcccttccgagggcggggataacattcgtgtttacagaggggtcgggatgatccctagcacacagcacaggggaaggaagggcttggcgtctagcccaggccggcagtctggccctggagccggagttcgggaccactttgccccattgccaccagcctctggacctgggggcttaagagagctggctcgtgtcaaagaactgaatcccaagaaagatgctaatatcagcagtattgatcttcccacctcgagccaggcttgctggggctgggggtgggagggctggcccagcgtgctgacctctgccccctcctttcctgcaggggctgagcgggtgatcacgctgaagatggagatcccgggctccatgccgcctctcatccaggaaatgttggagaactcagagggcctggacactctgagcggacagccggggggtggggggcgggacgggggtggcctggcccccccgccaggcagctgtagccccagcctcagccccagctccaacagaagcagcccggccacccactccccgtgaccgcccacgccacatggacacagccctcgccctccgccccggcttttctctgcctttctaccgaccatgtgaccccgcaccagccctgcccccacctgccctcccgggcagtactggggaccttccctgggggacggggagggaggaggcagcgactccttggacagaggcctgggccctcagtggactgcctgctcccacagcctgggctgacgtcagaggccgaggccaggaactgagtgaggcccctggtcctgggtctcaggatgggtcctgggggcctcgtgttcatcaagacacccctctgcccagctcaccacatcttcatcaccagcaaacgccaggacttggctcccccatcctcagaactcacaagccattgctccccagctggggaacctcaacctcccccctgcctcggttggtgacagagggggtgggacaggggcggggggttccccctgtacataccctgccataccaaccccaggtattaattctcgctggttttgtttttattttaatttttttgttttgatttttttaataagaattttcattttaagcacatttatactgaaggaatttgtgctgtgtattggggggagctggatccagagctggagggggtgggtccgggggagggagtggctcggaaggggcccccactctcctttcatgtccctgtgccccccagttctcctcctcagccttttcctcctcagttttctctttaaaactgtgaagtactaactttccaaggcctgccttcccctccctcccactggagaagccgccagcccctttctccctctgcctgaccactgggtgtggacggtgtggggcagccctgaaaggacaggctcctggccttggcacttgcctgcacccaccatgaggcatggagcagggcagagcaagggccccgggacagagttttcccagacctggctcctcggcagagctgcctcccgtcagggcccacatcatctaggctccccagcccccactgtgaaggggctggccaggggcccgagctgcccccacccccggcctcagccaccagcacccccatagggcccccagacaccacacacatgcgcgtgcgcacacacacaaacacacacacactggacagtagatgggccgacacacacttggcccgagttcctccatttccctggcctgccccccacccccaacctgtcccacccccgtgccccctccttaccccgcaggacgggcctacaggggggtctcccctcacccctgcacccccagctgggggagctggctctgccccgacctccttcaccaggggttggggccccttcccctggagcccgtgggtgcacctgttactgttgggctttccactgagatctactggataaagaataaagttctatttattctacacatgcctccagccttgctgcctccaccccctcctcttggcgtctggtctgggggcttgggatgggtttcgtcatgtgctctgggcctgtgatggccaggaatgagcactggggccaaggggctggccagggcacccttccaagctgccttctgaggcttaccttgtgctggggtctttggagatgctgagaaggagaaagtcctgccccttgggaagccctcagtctggggatccacactgcccatgtcaaggagccccagtctgggagtgggagagaagaggaggaaagctgcccccaccttcagggaacccccagtctgagggaggaagccggagccacccctagacatttctggtccttgggaagccttcaccatcacggcaggaatgacagatggcacaggagctggggtcagggactcatagaaacctaacaagaggcctggcgcagtggctcatgcctgtaattccagcactttgggaggctgaggtgggcggatcacttgaggtcaggagttcaaaaccagcctggccaacatggtgaaaccccgtctctactaaaaatacaaaaaagttagctgggcgtggtggcgggcgcctgtaatcccagctattagggaggctgaggcaagagaattgcttgaacctgggagctggagcttgcagtgagccgagatcgtgccattgcactccagcctgggcgacagagcaggactccgtctcaaataagaaagaaagaaagaaaaagaaagaaggaaggaaggaaagaaaggagaaaggaaagggaaaggacgaaagagaaagaaagggaaggaaagaaaggacagaaaggaaagaaagaaagaaagaaaagaaaaaagaaagaagaaagaaaggaaagaaagaaagaaaaagaagaaagaaacttaacaagaacacaggattgggatggaagctgtgggggcctagccgggagggagtaaggcaaagggttccttctgctagaggctgcctgccatttctacattaaccaccaggtggcggcagcgccttgcttgactcaccggccgccctaggctggaggcaaccgcggggaccgaggcgcttttcctccagtaaatattttctaacatctttacgagtctgaaatgaaatctaacatactgtacctgtacacgtgatttcacagatcaatatgttgtcacaaccgtattataaaggataaattgaggggcagtgctatgtgtttcaatagattaatgcttgcccctcttttgaatgaatacatttggatttaaaagaaggttggaagccattctgtacaagaagcccaggaacattaaagagcatgggtggatgttggaataaaaatcggcatgtttgatctataataaaacaatgcaaaaaaagcccaaacaaaacccttaatggttttttctttatcttttcttttcttttattttttgagacagagtcttgctgtgtcacccaggctggagggcagtggcgcaatctcggctcactgcaagctccgcctcccgggttcacgccattgccattctcctgcctcagcctccccagcagctgggactactggcacacgtcgccacacccggctaatttttgtatttttagtagagacggggtttcactgtgttggccaggatggtctcgatctcctgacctcatgatccgcccgcctcggcctcccaaagtgctgggattacaggcgtgagccaccgtgcctggcctcaaaacccttaatgttttacatgtaaaacagggtttgggcccagggttttcacttatgccaatgtccagttggacattctaaagttgtgcctgaggctgggcgcagtggcgcaagcctgtaatctcagaactttgggaggcagaggctgacggatcacttgagtccaggagttcaagaccagcctgggcaacatggtgaaaccctgcctctacaaaaaaaaatacaaaaattagcctagccttgtagtgtgcatctgtggtgtcagctacttggggggggggctcaggtgggagagttgctggatccctggaggttgaggctgcagtgagccgtgataacaccactgcactctagtctgggcaacagatggagaccctgtctcaaagaataaaaataaaaacaaaaaagttgtgccaagcaggtttttatttcaagaggatatcttgacgtccatagcccttgcccactaaatgccaatggggtcccccatcattgtgaaaacaaagcagtggcccccacatttacaaaatgccccttggggtagtgcctttgctgtttggaacctctagtcttggggttgtcctcagtggtccacagttcactgctgtcgagcagagttgctcagcttcagcaccaatgtgaagatctgagccaggttgtgggggctgtcctgtgcattgcaggatgctaagcaacatctccaaccttccgcccatgaaaccctagtggtgcttctctcccaccccagctgtaacaaccaaatatgtctccagacactgctaaacgcccccctggggggcaaaatcacccccatgtgagatccactgctgtggagtgtggtcctccagggctgatgtgctttgcactgagccagggcccatcctccgcagagagactgagccagaggaaggtgaccgggatgccacctgggcagagctgcaacaggcttgacaggcctacgggagtgcagggcagaggcactgaatcacgcttggggcagggctcagaagccttcctggaagaggtggcctctctcagctaaatctctttttaatttagttttatttattttgagacggagtctcccgctgtagccgaggctcattgctaaatctctagaggaaagaattggctaggtgggtgcagatttggaagacttagtatgaaaaaaagaatgtaaactatctccttaatactttttaatatcaatgaggcattaagatgaaaatactttgggtgtgctaggttaaataaaatacgtgactaaaattaatttcatttgtttccttttacttttttaatgtggctaatgaaaaacttgaaactacatacatggctcatatgctatttccatcggatgatgctgatcttgaacatcttctgacacacagtaggtaccctacaaatatttgttgaatgaatacatctggaaaacagcggcacagccccatctgggtttgtgtggaggggtctgggttgtggacacagaactgtcatcagagagatggtgcccaccatagcatggatagtgttcgggcatggcagtggtgtaggcctggggacaccttcagtttctcatccaacacatatttactgagcacatactacgtgccatggaaggggagagagcaatgccatcctgcaggagaagtgctttccctacggaagcgaggggcatccagctctgtcttggggtgggggctaccaggggagccctctccttgaaggtgtctgttttcttcccaagtgacaacaataggtgggtgggcattagctaggggaggagaaggctgcaggaagcagcggctactctgggcaaaggaacagcacgttcaaacgcttggcagcaagcaggtctggtgcttgttagaagagaaaattccctatggttctgagcacacctggaagccggtgctgtggagtcgaaggcctgacaggggcagggcttcagaaggaagctttgtgaaggcgcttgactcaccctgagggcaggggtgctgccctcagtcccgggtttaagtggggggcgctattcagaaacacctcccactgctgtgtggggcacaggagagctgagaaagacgccaggaactcagaaggacagggtggggtgatggcggggaacgcacagcctggtaggcaggatgcggtgaggcccgcaaggtgcagtccgatgacggcccctggatttctcgcttaggtcctgggtgatcttatggagagcagcccactggctggtgaagggggagggcagacgggaggggagacacaggagggggatgcgctgcataggcagcagctcttcgaatgcccgcaagtaggaagaagggggtggttggaagggaaggcagggccgggagcgcgtgtgttttgggagctttctcctgaggacagaagggactttcccgtttatagcctgggggagcagtagcggcggggaggatgaagatggaggagggaggcataacacacgtctgggttgccctctggcccgccgcccacccccaccccacctccatgaaagcgcccagcccccgcctcgccacaaggggtactgtgaggatgttgctcataggctcccgaggattgaggcctgcccggggaaagggagcctctcctcctcttccctccctgggcggggtctcttgggagggggggacagacctcctgtgatgccctggcaggtgggctgggttagggtggtagggagggagccattgtggctgcagctggcatcggatcctggccacccccgcagtgcatatcagagatcacacacacacgcgtgcacacacagaggtcacgccggatgtacacatgcacacatagcgcacaaggatgtttctgtgtacaggtgtgcacacgcagcccacacagaatggacatgtgcgtgtgtgcacaatgcactcacacaaagctcacagggatgtgagtacacagctctcaaggggcatatgtttctgtgtgcatgtgcacacagctcacccgggagggttacgtgtgtctgtgtgcacaagtgggcctcacgcagggtgtacacatgcgcgcacatgcacagcgctcacacagggtgtacaggtgcgcgtgcacacagctcacagtgcttatgtgtccgtgtatgcacactcgcagagagcccacagggggaccactctctctctgaacacagagagtgcctgagaatgctggcatcacagttgtttttgtccccagtaaaacaaccactctccaccttccgctctgttctccccctcgggtccactctctctcagggtcctggtctccttcctttccacctgggtggtggcatccaggacctgcctgagttcattctccgcccccagcccggcctgccccaggtgccgccggcagccactgggaggcagtacgaggcaagtgcgatgccgcccgcgggccgtccccacaacgcgtctcctgccggggcaggtcccgcgacagctctggtggaagcagcttccggcttctgcggtgcgggcggaggtggcggggtccggccctcgccgtccagtccgcgcgaggcggtgcccgcccctagatggccagatctcggcggccggtggccggtgacgccttgccgcggccgctgccgcactcgcggaggctggccggcgccgggtgcgcataggccggcggggcgcacggctcggggccggggcgccgggagggcagggccggtggcggaggtggcggcggcggcggcgggagcagcttctgcgcctcttcgtgtgcacggttgcagcggttgtcacgctccccggcgcgcgggcggcccttccagagcaggtggcccagctcggctacgctgagcagcgccgacagcagccccaccgcgaaatagaagagcacgaagacggtcttctcggtgggccggctcacgaagcagtcgaccgtgtgcgggcagggcggaccggcgcacgcgaagtgcggggccacgcggaagccgtagagcagcgcctggccgcccaggaaggtcagctcggccagcaggcgcagcgccacgctcagcaggtagcagcggcgcgcgcggcgggcgcgcagggcgcacggcgcgcactgggcctcgggcagtccgggggcgcactgcgccgccgcctcagcgccgcccgcctccttgcctgcccggtgcatggagtagacgacgaacagcaccgggggcgccgagagcagcaggatgtggaagagccagaagcggtagtgggagaccgggaaggcgcggtcgtagcaggtctggcgacagcccggctgcagcgtgttgcacacgaactcctcttgctcgtcctcgaacacggcgccgcccaccgtggccagcaccaggatgcggaagatcagcatgaccaccagccagaggcggcccacgagcggcgactgcagctgcacggcgtccagcagcgagcccaggaacgcccactcccccatggcgctggggacgcggggcggggagtcaggggatggggcaagtcagggacccctgccccttccaagcctatcggggtggggtccgttggaccttctctgacttcagggtgagtcgtgaggtaggagaggcccgggtttagcgatgagaccagtatgaaacggagggccacgggagggcccgaggggagcaggcgacgctcagctatgggttaccttctctttgggaccgatgggtgctggggaggatcccccatttgcattttagccgcaccccctgagccgtctccgttcgaccctgggatcctccagatcccagattcttaggaaggaccttggagatcagctggaccagcccctgacttgcctggtttcggaagcggaaacccagcggtgcccttagctgtcaaggatgctgtgggaagagtggagcctcgaacccgagacgctagacccaatttggtgcccatgggaggagtgggagtggcagaggcagcgagaccactcctttcttggcccaccatttctctcaccatttttactgcagtgaactcctctcagggtggggggctggtacagaggcaactccgctttcataactctcacagggtcctttgtcggaggtgtccctgccctcctaccccagcgtggtgggagtgcgacgccaggcttctccctcctccctggcctcctgtgcctccagcctccacatctcctgagatcctccccaccccacacttacacaggtccccacacgcccctggtgcccctaaaccgccacccaaccccactcaccctggggccgggactggggtgtcagagctgagccagggaccttgggaggtggctgggaccggcgcctcctgctccctctttcattttccctttcggatttggccaggatggaggacaggacaggatggctgagaggggctagcgctcccccttctcttaaaggaacagggtgaccctgctggctggctccgcccttgggaacaggcacggaccacgccccttgctgggctctgtggccctcactctttagctaaatttccatctggaaatgggggaggggggtaaccagagccacatcctttatcgaggaagctgggggattcctagaagcccttcccagacagaccctcagtctggagcctagatccactacgcactaaccatgccctgtgaagatggtcttcggggacagagggaggtttggtgctggagtttaaggggcagcaaacatctaacagcttctggttccagctctgccaccgctcaccttggacaaatcattcggcggtactgagccaggctttcctgccttgtcaacaaaggcggccagtccagctgacccccaagtttccttccagctttacatcttttttggaacggggtctctctacatagcccaggtcgatcttgaactcctggcttcaagtgatcctcacaccttagcctcctgagtagctgggattctctacttcttaatattgaattcccaaccatattacagagaaccaaaaaaacccttgtgcctgcaaaaaaaaaaaaaaaaaaaaaaatcccatatggaaaaccattaaaatatcccaagtgcctggctttgatagttaaataaaatctttggtttccttcccacttttctgttatttccagctttactataatgaacatgttatttatttatttatttttaatttgtttgttttgagatggagtctagctctgtcgcccaggctggagtgcagtggcatgatcttggctgaatgcaacctccgcctcccgggttcaagcgattctcctgcctcagcctccccagtagctgggattacaggtgtgcgccaccacgcccggctaatttttgtatttttagtagaggtggggtttcgccatgttgaccaggctgatctcgaactcttgacctcaaacaatccgcctatctcagcctcccaaagtgccgggattacaggcgtgagctaccacacccggcctaacatgttattttattatttatttatttatttatttattgagacagagttttgctcttgttgcccaggctggagtgcagtggtgtgatctcagctcaccgcaacctcctcctcccgggttcaagcgattctcctgcctcagcctcctgaatagctgggattacaggcatgtgccaccatgcccagctaattttgtatttttaatagagacaggatctctccatgttggtcaggctggtctcgaaatcctgacctcaggtgatccacctgcctcggcctcccaaagtgctgggattacaggcttgagtcaccgcgcccggcctcatgttattttataatgtgaaaaataggactttttccccccagaaggctctgaattgagagttccctcctactgccctgggtggcgggggaagctgttttatggagaagggagtaagggtgaccgacggtgatctgagtggtcagggaggggacactccaggctgagatgtttggttgtctgctctgccttcctaggggtccgcctgagtgcatagcaaaacccgcttcacctatgcacctgctgggccagtccccgtgtggaaccccgttagctccatatgccaatgagctcattcgattctctgtcaatggtggcatgagggcactatttacaccaggggaaactgagactcagagggtctaagccacttgcctgctgtcgcgcagccggtaaatagcagatccaggcctatgcgaggcccaactagttcttgagcccaagctcttgagcctttcatggaactgtcctccatccagcctggctgggcttcccaggtgctgtcccagggcctgacagtccccaggaggggttgcctctatgccagccttgtgtggggctggtgggtgcaggcactggagggaggtcatgcctgcccctctgaagaagggcagcaggactcacctccttggtcacagttcctctccctatcagccatgggtgcctgtgtggttttccatatgctgacgcagacccccaggtccactttcaggaaggggaaggcacgtacccttcacccaccactccctccagctcaggggcccagcccccgcaggaaaaactctaggtaaactcctgcttgtgtgtgttggggaaccctcctgccctcgtgcaggcttcccttgggagtgggcctgggtgggggacgctgccctggagaaagtccaagggaaaaagcacatgctggagccccagattctgaaaacaggatgtgggttgggggcgctgctggcctcaccctcccgacctccctctgcccctggcaaagctgctaccggccccctgcccccagccacaggggctcagggtcacatctcatctcccttgactgtccaggaatggtccccaccccgtcctgtcccgtggctcctgctgggtcaggccattggcgccacctggaaaaagcccatcagccctgcgggaatggaaagcagctgaggcggtgggccagggtggggtgggaagtggagagcctacagtcaccctgtgctgtctgcagcctgtgatgccacagggccagacccagagactctacaatctcaggcccggtcctccttccctgatagcgccatccagcctgagaggaggtgttgctgacgctgcctccatctggcagccggtggcccattctcggccatgcctaaagactggggccgggggctgggtgcagtggctcacgcctgtaatcccagcactttgggaggccgaggcaggcggatcacaaggtcaggagatcgagaccatcctggctaacacggtgaaaccccgtctctactaaaaaatacaaaaaattagccaggtgtcgtggcgggcgcctgtagtcccagctacttgggaggctgaggcaggagaatggcgtgaacctgggaggcggagcttgcagtgagccgagatggcaccactgcactccagcctgggcaacagagcaagactccatctcaaaaaaaaaaaaaaaaaatctggggctgggctgagaggccaatcctgcctcgctccggtctctgttccagacacctctccctggccatcggattgtggggccactgctcatgtaagacacacataggtgcacgtatgtgtttgtacccagtaactatcagccatggtcaaccccaccatgttcttcaacatcgccgctggcagtgagcccttgggctgtgtcgccttcgagctgtttgcagacaagtttccaaagacagcagaaaactttggtgctctgagcactggagagaaagggtttggttataagagttcctgctttcacagaattattccagggtatatgtgtcagggtggtggcttcacacgccataatggcactggtggcaagtccatctgcagggagaaatctgatgatgagaacttcttcctgaagcatacagtcctggcatcttgtccatggcaaatgctggacccaacacaaaccgttcccagttttttatctgcattgccaagactgagtggttggatggcaagggtgtggtctttggcaaggtgaaagaaggcatgaatattgcagaggccagggagcgctttgggtccaggaatggcaagaccagcaagatcaccattgctgactgtgggcaactctaatgagtttgacttgtgttttatcttaaccaccagcccattccttctgtagctcaggagagcaccctccaccccatttgctcacagtatcctagaatctttgtgctctcgatcagttcgctttgagttccctgttttccttgttcctttccatgcctagctggattgcagaattaagcttatgattatgaaataaaaactaactaaataaataaaaataaattatttgtaaggcctggcatggtggctcatgcctgtaatcccagcactttgggaggccgaggcgggtagatcacctgaggtcaggagttcgagaccagcctggccaacatggtgaaatcccgtctctactaaaaaatacaaaaattagctgggcatggtggcacatgcccgtattcccagctagtcaggagaattgcttgaactcaggaggtggaggttgcagtgagccaagatcgtgccactgcaggccaacctgggcaacagagggagactctatctcaaaaaaaaaaaattatttgtagagatgagggtcttgccatgttgcccaggctggcctggaactcctgggctcaattgatccgccagccttggcctctcaaagtgctaggatcacaagtatgagccaccataactggccacttattttttattgttatttatttatttattctatttactgacatccttgagccatcacactgctgttttgtctcctgtgccctgctaacattttaaaaagtccttacagaaatgctgtcttttcgtgaggctttccccagctgccctagcagaaatttacccctctgtttcctgtcccttctcagctttatttcctttgtattgactactacataactatacacacacacacacacacacacacacacacacacacacacacacatagagagagacggagcctcactctgtcacccaagctggagtgcaatggcacgatctcagttcactgcaacctccgcctcccaggttcaagcagttctgcctcagcctcccgagtagctgggattacaggcacccaccacaacgcccggctaatttttgtatttttagtagtgacgaggtttcaccatgttggccaggctggtctggaactcctgacctgaaataatccacccgcctaggcctcacaaagtgctgggattataggggtgagccaccgcacctggccaattttatctttttcttatgtatcctgcttagcgtccatctctcccaatagcacaggtgatccacagggaaggaatttttggtgctctgcttactgtcccatccccagcacctagaatggttgggggcacacagtggatgctcagtagatgtttgttgggtggatgaatgaatgaagtgggtggaagtttctgccctaaggtgataagaactctgagtgtctcaggtctcaactgctggctctggtctcctctagggctgtgggcatttaagtggccaatccagtctcaggtcagcaatcagaatttcccatcctagatagaaacaagaactcaaaaatggattcatggtaaacacctgcccccagctcggctggccttgggtccatgcctgggtgggagagggaaggggtggagggcggcagagttggctcttcttggtcccttctagtccttctgcaccctccccaacctggctgcagcttctgacccttcatattcttcccagcgccccgaaaaccttccagaccagatgacttctgccaccccagggtggccccacctcctggctcttgccttggagcttgcctttggctccctatggacccctggggccctgcattttcaacacctgggacgcgccttcgcatctagcctttgctccctcctttggctccatgattatttaagattaggtttggggccgggtgcggtggctcacgcctgtaatcccagcactttgggaggctgaggcgggcggatcacgaggtcaggaggttgagaccatcctggctaacacacggtaaaaccccgtctctactaaaaatacaaaaaaattagccaggcgtggtggcgggcacctgtagtcccagctatttggggggctgaggcaggagaatggcgtgaacccgggaggcagaggttgcagtgagccaagatcgcgccactgcactccagcctggatgacagagcgagactctgtcttaaaaaaaaaaaaaaaagattaggtttggatggaacaacaattccaaacagtggcttaagcaagagagaagtttgtttctctctcacataaaaactctgccccagctgggtgcggtggctcatgcctataatcctagcactttgggaggcctagaggggcggatcacctgaggtcaggagttcaagaccagcctggccaacacggtgaaaccccatctctactaaaaaatacaaaaattagccgggcgtggtggtgcacgcctgtaatcccagctactcaggaggctaaagcaggagaatcgcttgaaccctggggcggaagttgcagtgagctgcgacattgcactctagcctgggcaacagagcgaaacgcagtcttaaaaaaataaagggctgggcgcggtggctcacacctgtaatcctagcactttgggaggccgaggtgggcggatcacctgaggtcaggagttcgagaccaacctggccaacatagtgaaaccaggtctttaccaatagccgggcgtggtggcacgggcctgtaatcccagctactcgggaggctgaggcaggggaatcgcttgaactcaggaggcggaggttgcagtgcacccagattgggacactgcactccagcctgggcgacagagagagactccatctcaaaagaaaaaaaaaaaaagaaaaaaaagcctgccccatggagtcctcaggggcgcgggcacctcgctgcccccgccacagccccatgctgtctccctctcgctctctctctctctctctccccctgtctcagaaaagggccaggaagtggccactttaccgatttgctcacatgtcattgggtaggatgagccccacgaccacacctatccgcaagggatgctgggaaatgtagtctttattcttgtgcccaggagggagcagggagactccctcgctgtcacagatctgcttctggcattggtcccccacgctgacatgggtcgttggactcactgggttcctcccaagtctttgcccccattagctgctctggaggaagaaggaagcctccacagtcttgtctgtcaccttgtccctaggcccttccaaaccactgcacctctgggctttccttcacacccctctgccaagcctcatcccttctttaccgtccttgggcagaagggtcatttcctccgaggggagctcctgcgttttcgcccatttttaggttgcacatgtagcaaccttgctctggaaagacaatgagtgtacctgaaggtggctggggcctgcggtagcctcttcttagtgaccaaggggcttgggaatccctttcttcctttccttgaaagcccttctttttcctgagtgaactgacaggtgagagaaattgctttgggattggggctggggcaggggaaggatttgagtcatcaagaggcatttttcagagtccctcccctgcaccccccccaccacccctttgccatgcagctctgaatggcctgtgtttttgtacatgtcaagatgtgtaagcaatcactatcactgcctgtagcctggggtcccgatcctttttccatcaccccagcctcatgatcctggacttggtctgggatggagagtactccgagatccctgcccttccagagtctctcaagggggactaagcaggtcagtagtgcaatcaggtcagctcaagatcagtggacccacagaccactgaagctccctgcctgaaaacaattctggacccaaagggctgtgcttggcacaggccctggaaagttactaggggcagaagacaaggtcatctatggatggagcttcctttcttccacctaaaaactgtcaagcgcatccatgtgaagagaccaccaacagggtttgtgtgagcaacaaggctgtttattcacttgggtgcaagtgggctgagtccgaaaagagagtcaatgaagagagatggggaaggggttgctttataggagttgggtaggtaatggaaaattacagtaaaaggtggttatctattgttagcagaggagggggtcacaaggtacatggtggggagattataagactcattgtccagaagaagaatgtcacaaggccgattgatcagttaaggtagggcagggacaagtcacaatggtggaatgttgtaatgttggttaatcagttaaggcaggaactggctgtttcacttcttttgtggtttttcagctgccccagacttcttggctcctgcaggccatctggacgtgtatgtgcaggtcacaggggttataatggctgagcttcggctcagaggcctgacaaaaacacatttatgggtataatatctttttacactcatcatgatgtattggagctaccttgagcccaatgaagatatcgtctgtaatggttaatactgagggtcaacttgattggattgaaggatacaatcctgggtgtgtctgtaagggtgttgccaaaggagattaacatttgagtcagtgggctgggaaaggcagacccacccttaatctgggtgggcacaatctaattagctgccagcacggctagaatataagcaggcagaaaaatgtgaaaagagtgactggcctagcctcccagcctacatctttctcccatgctggatgcttcctgccccccaactccaaattcttcagttttggaacttggactggctctccttgcttctcagcctgcagatatggcctattgtgagaacttgtgatcatgtgagtaaatacttaataaacttccctttatatatatctattccattagttctgtccctctagagaaccgtgactaatacattgtcttacccaagagaacacaaatctgactcctgaaagtaccgagcaagtaagagggaatgtaccatgatgcaactgctttgaaaaccagctcctcagtttcttatgaagttaaacatacacttaacatgtgactcgacaattccactcctacgtatctacccaagagaaatgacaagttatgtctagaaaaggatatgtactctaatgcttattacagctttattcataatgagcccaaactggaaacagcccagatgtccatcaacaggtgaatggagaaacaagatgataccatggaaaaatattcagcaataaaaaaaaaagaagggccggggcccttggtcttgatctcctgacctcatgatctgcccgcctcagcctcccaaagtgctgggattacaggcgtgagccaccgcgcccggccaacatggatgcatttctaaaacatgctgaatgaaagaagccagacacaaaagcatacgtactgtgatttcatgtatatgaagttctagaataggtgaatgtaatctgtaatgctggaaatcaaattagggtttttctggggctaggggttgaagaggcacataagaactttttgaggtgatagaaatgctttatatcttgattgtgattgcggttgttcaagtggatacatttaccatttacagccataccaccctgaacttggaagctaagcagggttgggtctggttagcacttggaagggaggagttcacctttatcaaaaagtcatcaatctttacacttggaatgaatgcattttatggccgggcgcggtggctcatgcctgtaaccccagcactttgggaggctgaattgggcgaatcacctgaggtaaggagttcaagaccagcctggccaacatggtgaaaccccatctccattaaaatacaaaaattagccaggtgtggtggcgggtgcctgtggtccgagctactcgggaggctgaagcaggagaattgcttcaacccaggaggcagagattgcagtgagctgagattgcatcacttcactccagcctgggtgacagagtgagactccgtctgaaaaaaaaaaaagaatgggtgcattttatgtatgtaaattacaactcacggttgattaaaaagaaaaaagcaatgcatatctgtgctgaaaatcattgaggtgacaatgaaaacagagagtaagactttctctaagtcatcattacacatctctctctcacctctccggtggacttctttccttcttctccccctcctcctcctttttgtcctcctacactccacactggtcaccctctcctcttttgttgactgtcttttccctattctttatgaaatagggtaatctggcttgctcctgatgatgcaggacaggcaagccccaaaagtgaggcttagcccaagagagtttttggctttgcccaggaaagaatttaagggtgagctggtggtgttagcaatttttattgacgcattgatgcacagcagcagcagaggtgctgctccatgcggagcggggctaccccataggcaatgtgcccagagaagcagctcagaggcaggtctgcagtcacatgcatacccacttttagttatatgcaaattaaggggaggtttatgcagaaatttttaggaaaaggatggtaacttcccggtggttaggttgttgccatggaaaggggcggtaactcccctgggtgttgccatggcaatgggaaactgacagggcccactggtgggcactgacggaaagctgcttccactcatccctgttttagctagtcctcaattttgtccggtgtcccaggcctgcccgcagagtcgagtcccgcctcctacctcactatcagtttgaatttctaatgtttgagttacacattttccccccctttttgtggagaataggttctagctatattgcccaggcaggtctgaactcctgggctcaagatatctgcccgcctctgcctctctaagaactgggattccaggcgtgagccacagcgccccgtgagtttctaatgtttgaaagggattttgagctcaaaatcagtatccttgggtttgaatttatttacagttgatcaaaactttaaattttaaaaaatccaattttttccttttaagccttcaggtccaatttacacagtttgttattctagttatacatttaataatttggggccgggcacggtggcttacacctgtaatcccagtgagaggtgacagtgtgctggcagcccttgctcgctctgggtgcctcctctgcctgggctcccacttcggtggcacttgaggagcccttcagcccaccgctgcactgtgggagcccctttctgggctggccaaggtcggagccggctccctcagcttgcagggaggtgtggagggagaggcgcaagcaggaaccggggctgcacgctcggcccttgtgggccagctggagttccgggtgggcgtggacttggcaggccttgcactcgcactcagagcggcctgccggccctgctggccccgggcaatgaggggcttagcatccgggccagcggctgcagagggtgtgctgggttccccagcagtgccggcccactggcactgtgctccatttcttgctgggccttagctgcctccccacggggcagggctcgggacctgcagcctgccatgcctgagcctcccctcctgtgggctcctgtgcggcccaagcctcctcgacgagcactgcctcctgctccacgcacccagtcccatcgaccacccaagggctgaggagtgcaggcacacggcacgggactggcaggcagctccacctgcagccctggtgcgggatccactgggtgaagccagctaggctcctgagtctggtggggacttggagaacctttatgtctaggctaggggattgtaaatacaccaattggcactctgtatctggctcagggtttgtgaatgcaccaatcgacactctgtatctagctactctggtggagacttggagaacctttatgtctagctaagggattgtaaatacaccaatcatcactctgtatctagctcaaggtttgtaaacacaccagtcagcaccctgtgtctagctcagggtttgtgaatgcaccaattgacactttgtatctagctactctggtggggacttggagaacctttgtgtggacactctgtatctagctaatctagtggggacatggagaacttttttgtctagctcagggattgtaaacgcaccaatcagcaccctgtcaaaaacggaccaatcagctctctgtaaaatggaccaatcggctctctgtaaaatggaccaatcggctctctgtaaaatggaccaatcagcaggatatgggtggggccagataagagaataaaagcaggctgctggagccaacagtggcaacccgctgagatcaccttccacattgtggaagatttgttgttgtacggttttcaggttgtacagatcttactgctgtctctctttgggtccacattgcctttatgagctgtaacactcatctggaaggtctgcgtcttcactcttgaagccagtgaggccatgaactcaccaggaggaatgaataactccacacgcgcccccttaagagctgtaacactcaccgcgaaggtccgcagcttcagtcctcagccagcgaaaccacaaacccaccagaaggaagaaactccaaacacatccaaacagcagaaggcagcagaaggaacgaactccgcacacactgtttttaagaactgtgacactcaccgcgagggtgcacagcttcattctttaagtcagtgagaccaagaacccaccaattccgcacccaccagcactttgggaggtcgaggccagcggattgtctgagctgaagagttcgagatcaatctgggtaatacggtgaaacccaatctttactaaaatacaaaaaattagcggggaatggcggcctgcgcctgtaatcccactccggaggctgaggcggaagaattgtttgaacctgggcggtggaggttgcagtgaactgagattgtgccattgcactccaacgtgggcaacagcaagactgtctctcaacaaaataataataagaataatcactttcacgtattatctaatttttaattacctcacttttgagaagtcaaatttgcctaagcataaaacatctaattgattacatttctaaacacttctaatgcctgagggggcagacgtgcaactctaaaaaaacaatatcttcctatgcattaaaacaacttgtaaagcaaataaaccaaatttaccaatgtggtaattcatgtgcttttttttttttttttttttttttttttttttttttttttggggttggagtagccttgctctgtctcccaggctggagtgcagtggcacgatctcagctcactgcaacctccaccacccacgttcaagcgattatcctgcttcatccaccccagtagctgggactacaggcttgcgccaccatgtccggatgtccggctaatttttgtagtttcagtagagacaggatttcaccgtattggtgaggctggtctcgaactcctgacctcaaatgatcctcccacctcggcgtcccaaactgctggaattacaggcgtgagccaccgcaccccgccctaattcaggttcttttaagttttacaaaaatgttataatgtttacaaatttaatcaagttccttaagcctttcaatgttaaatcatacctagaaaattgtgcatttaaattgaaaaaaacagctgggttccaagatttgagggagagtaaaaaccaaaaccaaaagaaacagctgggtgtaggcgtggtggcaagtgtctgtagtcccagctacacaggaggcctagatgagaggatcatttgagcccaggtagtagaggctgcagtgagccatagccgtgccattgcattccagcccgggtgacagagcaagactcttgtctcttaaaaaaaattgaaattacaaggcaaatctgaaagattctctaatgtgacaggttgaaagaatgttacgttctcttaaacattagagacatttaaaatatgcaatacagacacattatcctgatgacttttaacactaaattataaatactatgggtttgattaccttatcatttccatattatttctttaccctcagggatgtaaagtcatctgtcccactccgaacagtttgaccatgtcaggtggacagaggatttctacattaaaaataaatgaagactgagatttagggttagtgattcaaggctgagatttgggaccaggttgctgctttttttttttttttgacagagtcttgctctgttgcccaggctggagtgcaatggtgtgatcttggttcactgcaacctccgcctcttgggttcaagcgattctcctgcctcagcctcctgagtaactgggattataggcgcgcgccaccacgggtggctaatttttttttttattagagatggggtttcaccatattggccaggctggtcttggactcctgacctcgtgatccgcccacctcagcctcctaaagcactgggattagaggcgtgagccaccgcaccaggcccaggttgcttcttttcttgtagttgagcctgtctgttttatcagcagcagtccccaagttcacccctttcagtgggaatttgttttataactcactttgtctaattgttcgctcatgattaggttcaagttaagtctttttggcaaggatactccatgagtgatgatgtacgcttcccattgcatcacatcaggagcacattatggcatttggtctcattactggtgtgccaagtttgatcacttagttaatgtggtgtctgccagagcgctccaccttttcactttgtaatttatcaaagatgggtttttatgttctcatatttagtcttttcatagactcttttgtctaacagagacaattataaagcacataatttgagtttgcactccctggattctacaaccacacagatggtaaggcaaccatttttccatccagctcaaactcctgtttcatccggcaagaaaagatacattactggttttctttctttctttttctttctttcttttttttttttgagatggagtctccctctgttgcctaggctcgagtgcagtggcgcaatctcagctcattgcaacctccacctcccgggtccaagcaattcttctgcctcagcctcccaagtagctgggactacaggcatgtgccaccacgcccggctaatttttgtatttttagtagagacggggtttcaccatattggccaggctggtcttgagttcctgacctcgttatccgcccacctcagcctcccgaagtgctgggattacaggtgtgagccaccgtgcccggcacattggtggttttagtatgtttagtagagacagggtttcaccatcttggccaggctggttttgaacttttgacctcaagtgatccgccccccttggccttccaaagtgctgggattacaggcgtgagccactgtgcctggccaaaacttctttttctttatcttttttttgagatggagtctcgctctgctgcccaggctggagtgcagtggcgtaatctcagctcactgcaacttccgcctcccgggttcaatcgattcttctgcctcagcctccccagtagctgggattataggtgtgcgccaccatgcccagctaacttttgtatttttcgtagagacggggtttcaccatgttggtcaggctggtctggaactcctgacttcgtgatcctcccacctccgccttccaaagtgctgggattataggcgtgagccactgcttctggccagagtatcacttagcaggaatattggccatcatttccgagtctttcttttttttttctttctttgtttttgaggaagagtctcgctctatcgtccaggctggagtgcagtggtacgatctcactcagctcactgcaagctccgcctcctggcttcacgccattctcctgcttcagccttccgagtagctgggactacaggcgcccgccaccatgcccggctaagttttgtatttttagtagagacgggatttcaccatgttagccaggatggtcttgatctcctgacctcgtgatctgtctgcctctacctcccaaagtgctgggattatagactgagccaccacacctggccagccttctttcttcacactgttatttttcaattattgaagacatatctactgtgtcagaagggagtcttatgcactgtacaaggtgttactaccaaaagctgcaacccaagtaaaggacctgctaatctgcctcatggccaccgcttcagaccttggaaagtgacacgaggctcagcgttatcacataactgcagtgtggaccagcaactgctgagcacaagcagtctattcaccctcctcagtgtcatacctttctgctgtcttctgattgagttctctgcctacactctcctccaggtgatagttgtagcctttacagcaaaccagtggacaagaagcatcagggtctttggaaattttgctgtgcattggaccagtaaaagtaattccagatctgaagacagcttgactttggcttatttttactgattcctatttgtgtttttcagaaagagctacttgatcaccagctctagaagtatcaggagttacaattatccaatcttatgcaaattggctggtgggctgcaaagcttgtgtactttttgcagtgggggttgtacaaacagaaaaataaagaatacaagggtcgggccaggcacggtctctcatgcctgtaatcccagcactttgggaggtcgaggtgagaggatcacttgaaaccaggagttcgagaccagcatggccagcttggtgaaaccccgtctgtactaaaaatacaaaaattagctgggcatggtggcacacgcctgtagtcccagctactcgggaggctgagacaggagaattgcttgaacctgggaggtggaggttgcagtgagctgagattgtgccactgcactccagcctgggcgacagagtgagactgtctcaaaacaaaaaacaaggctcttctgaagacgctttaatgaaaatcattatttcttagtcaccccaagagcatgaatttgatgtggttgggaactcaagctaaatattgtgaaggtgtaactctgtgttgacctctagccatgcagctcagttgttttgcaaactgtcctgatttcccacagatgacttgtcctactgaggacacctatcagtaggtcagagagcagctttgtgagccttcctgctggtacccagaagtgagtttgtgcccactaattttttagcattttaattcctcgcaacagaagagactggcaaaactcaacaattctctgtatttatttatgtatttttgagacaaggtcttgccctatcacccaggctgatgtgcagtggcacgatcatggctcattgcagctttgacctcatgggtttaagggattctcccacctcagcctcctgagtagctgggaccacaggtgcaagccaccatgccctattaacttttttttttttttaagacagggttttgctgtctgtcacccaggctggagtacagtggtgcgatcttggctcactgcaacctccacctcctgggttcaaatgattctcctgtctcagctgaccgagtagctggtattacaggcatgtgccaccacacccagctaatttttgtatttttagtggagatggggtttaaccatgttggccaggctggtctcgaactcttgacctcaagtgttccacctgtcttggcctcccaaaatgttgggattacaggtgtgaactactgcacccagacaagaaaacacatacttatttttataaactataggaaagcacaaagaaaacaaaaatcatcgaaatctcattctccagataaaagcagctgacattttgctgcgacttgcaaaatgcctttggattcagataacagtggttctgaaactttagcgtgcatcagaattaactggagggcttgttaaaacagtgcttctgagtcagaagttttggagtggagccgataatttgaatttctttctttctttcttttttttttttttttgagacagtttccctcttgtttcccaggctggagtgcattggcacaatcttggctcactgcaacctccacctcctaggttcaagcaattcttctgcctcagcctctcgagtagctgggattacagatgcccgccaccatgcccagctaattttttgtatttctagtagagacagggtttcactgttggctacgctggtcttgaactcctgacctcaggcaatccacccatgtcagcctcctaaggtgctgggattacaggcatgagccaccacatccagctgataatttgaatttctaagaagctcccaggtgtccctgacactgttggtccaggtatcatacattgagaagcactggatatgtgcaccttggctgttccaagtagggtctgcaaccagaggcattgacatcattttgggaacttgtaatgcagaatctcaggccccagctcagacctactgaatcataatctgtaatttaataagatccctaaaaaatttttaagcaccaggcacggtggctcacgcgtgtaatcccagcactttgggaggccaagcgggtggatcacgaggtcaggagttcaagaccagcctggccaagatggtgaaaccctgtctctactaaaaatacaaaaattagccgggtgtggcggtgggcacctgtaatcccagctactcgggaggctgaggcagagaattgcttgaacctgggaggcagaggttgcagttagccgagatcgtgccactgtattccaacctaggtgacagagtgagactccatctcaaaaaaaaaaaaaaaaaaaatttttttaagcacaggtttgagaaggattggtttatattttaagcctcatagtatataacagttactccccccaccatattgaggtagaatttacacatagtgcaccattttataatgtataatttgatgagttttgacaaaatgatactaaatagttttgtacccttttgtctctctacccaacataatgaggactttcctgtagtattagatgttttggaaaaacatgacttctaatggctgtacaatacattgtaggtaaggatgttccagtttaaccaattcttcttttatttatttatttatttatttttgagacagagtctcttgctgttgcccagtctggactatagtggcgcagtcttggctcactgcaacctgcacttcctgggttcaagcgagtcttgtgtctcagcctcccaagtagctgagactacaggtgtgcaccaccacactcaggtaatttttgtattttcagtagagacagggtttcgacatgttgcccaggctggtctcctgagctcaggcaatctgcctgcctaggcctcccaaagtgctgggattacaggcgtgagccactgtacctggcccagtttaaccaattcttctattgtgagacatctatgttgttcccaatttctcaccagtgtaaataatgcttcaatgaatgcttttggacttaaatgttttcgtttggactttaacatatttttccacagctaaattactgaggaaagggtacgggacaggcaagaacaggtatccattactcaagaatgaaaagttaatgaattaaatttttctgtttgggtttcaggaaaaatggctagaaatcattaaaaaaaaaatccattgcagcagaaacagtgggatgcactgtatcttaaaaacaaaaagggccaggctgggcacagtggctcacgcctgtaatcccagcactttgggaggctgagatgggtggatcacctgaggtcaggaactcaagaccagcccggccaaactggtaaaactctgcctttactaaaaatacaaaaattagctgggtgtggtggcgtgcgcttgtaatcccaggtactcgggaggctgaggcaggagaatcgcttgaacctgggaggcggaggttgcagtgagccgaagctgtgccattccactccagcctgggcgacagaacgagactcaatcttaaaaaaaaaaaaaaaagaaaaaagccgggagtggtggcaggtgcctgcaatcctaggtacttgggaggctgaggcaggagaattgcttgagcccaggaggcggaggttgcagtgagctgaaatggtgccactgcactccagcctgggcagcagagcaagactctgtctcatggaaaaaataaaataaaaaaaaaaagactcagtaaacttactgttgaatcctttaccaattaatgcaacttttgagtcttttctcaatagccattcttttgtaattcataacttatatgtatttaaggaatgtttcatacacataggaaataaccacattctataaagggtctaaatacataaaactatcacgtttattagcaaatctttatatcctttaatgtgtcagtagcttaagaaataatgaaggccgaaggccaggcgcagtggctcacgcctgtaatcccagcactttgggaggccgaggcgggtggatcacgaggtcaggagatcgagaccatcatggctaacatggtgaaaccctgtctctactaaaaatataaaaaattagccaggcgtggtggcaggcggctgtagtcccagctacttgggaggctgaggcaggagaatcgcttgaacctgggaggcggaggttgcagtgagctgagattgtgccactgcactccagcctgggcggcagagtcagattccatttcaaaaaaaaaataaataaataaaagaaaaaaaaaagaaataatgaataggcctggcatggtggctcacgcctgtaatcgcagctctttgggaggttgaggcaggtggatcacttgagcccaggagttccagaacagccggggcaacatagtgagaccctgcctctacaaaaaatacaaaaattagccaggtgtggtggtgtgtacctgtggtcccagctatttgggaggctgaggcaggaggatcgcttgagcccaggaggcagaggttgcagtgggccgagattgagccactgcactccagcctggatggtagagtgaaaccttgtctcaaaaaaagaaaaaaagaaaaaaaagagtcaaggaaacattatccgctttcagttagcaaggtctttactcatcaggaaatgtaaaacttctactttcaaaagagaactattggccgggcgcggtggctcaggcctgtaatcccagcactttgggacgcggaggcaggcggattgcctgagctcagaccagcctgggcaacatggtgaaaccccatctctactaaaaatacaaaaaatttaagctgggcgtggtggctcatgcctgtaatcccagcactttgggtgtctgaagtgggacgatcacttgaggtcaggaattcgagaccagcctggacaacatggtgaaactccatctctactaaaaatacaaaaattaactgtaatttttgtattccctgtgatcccagccacttgggaggctgaggcatgagaatcacttgaaccaggcaggcggaggttatagtgagccgagatcgtgccactgcactccagcctgggtgatagagcaagacaagactttatcccccaaaaaacaaaaaaacccagaaaatcccacaaataaaaacacaaagaattagccaggcatggcagtaggcgcctgtagtcccagctacttgggaggctgaggcatgagaattgcttgaccttgggaggcagaaagcagagaattgcagtgagctgagatcgtaccactgcactccagcctgggtgccaaaatgagattctatctccaaaaaaaaaaaaaaggaaaaatatttgattcttttactttctaaaaagagtttacatactttcctcccactatttattttgtaaacaactggcatatttaccagatggggatttcatctttgatttgtaatctgcttttttccacttggcaatgtcgtgaacatctatcttttcatgtcaataaatgtcaataaataaacagtatagatgatcattcatttttttttttttttgagacagtcttgctctgttgcccaggctggagtgcagtgccatcatggctcactgcagccccctgggctcaagcaatactcctgcctcagccttccaagtagctgggaccacaggcatgcaccaccatgtccagctgatttttacctttttttttgtagagatgggggtctcactacgttgcccaggctggtctcaaactcctgggctcaagcaatcttcccacttcagcctcccaaagtgctgggaatacatgtatgaaccactgtgcctggtctacctgatcattttttttttcttgatggaatttcactcatgttacccaggatggagtgcaatagcacgatcttggctcactgcaacctccacctcctgggttcaagcgattctcctgcctcagcctcctgagtagttgggattacaggtgcacgccaccacacctggctaatttttgtatttttagtagagacggggtttcaccatgttggtcaggctggtctcgaactcctgacctcgtggtctgcttgccttgggctcccaaagtgctgggattacaggcgtgagccactgcgcctggcctacatgatcattcctaataggcacctggtattccatatttaccattttaaccttttggacatttaggttattttccattttattattacagcaacttcaataagcatctttgcatgtggctttgttttgatatagttgtacattcacatagttttaagaaatggatcaggccgggcatggtggctcacgcctgtaatcccagcactttgggaggctgaggtgggcggatcacaaggtcaggagtttgagaccagccgggccaacatggtgaaaccctgtctctactaaaaatacaaaaattagctgggcgtggtggcatgcacctataatgccagctactcgggaggctgaggcaggagaatcgtttgtacccgggaggcagaagttgcaatgagtcaagatggccccagtgcactccagcctgggcgacagagcaagactctgtcccagaaaaaaaaaaaaagaaatggatcagaaacaaggactctttctgaaaggaaaaaaaaaagaatggagatccatcgtatactttgcccatttcccaattttgcaaaattatatagtaaccagaatacttacattgaagcaacccattgatcttactcagatttacttatactcatatttgtgtgtgtttacatagttttttgcatgtctgattcttctgtcaaacgaaattcctttttttttttttttttgagacagggacttgctcaggctggaatgcagtggcacaatctctggtcactgtaacctctgcttcctgggctcaagcaatcttccctccttggcctcccaaactgctgggattacaggtgtgagccaccatgcctggcccagatttctttgaaagggctaattcctccatatctttgtcaacactacttttgggttttgttcagtttatccctctgtaactcaagattactttttttatagttactttttaaatagtttttgacatttaaatatttcatctatttgaacttaattttggtgtaaggtgtgaaagagatttatctgattttttttctaaatggattagccagttgcctcaatatatcttactgataccatcaagtagttgactaggttatcaaaatagttgttaaaggaaggtatcattaaaaaaaaaagatacatgcatatttactgatcaagtgtggtggagatgaagaacttagtcctcatgtataaaatctcaataaagagtctttggccttaattaggtcttaatgcctatctcttggacttatcaccttagccagaggctgtaaggtctgtcacaatatgattggaatgcttctgaaagggaagtgaagactatattttagaataaggaaaagggtgtagtgtgtgttttaaaagaggcattctatgggttgcaatgtttagaacattttattaaagtacaaaattgttggaatttagctaatagaaaaacatagtaaatatttacaaaaacgttgataacattactcaagtcacacacatataacaatgtagacaggtcttaacaaagtttacaaattgaaattatggagatttcccaaaatgaatctaatagctcattgctgagcatggttatcaatataacatttaagatcttggatcaaatgttgtccccgagtcttctgcaatccagtcctcttagaaattggtttctctctttgggagattcagactcagaggcagccagaggggacaggtcaagagctgaaataatcacataactactctaattttcttcattctattgactgtgtcaagttatagacacagccaaagtgtttttcttcggcctctgatgatttgagaagatgaagaacatgagcaatttctcattgcttaaagaaaaacttggcacataagaggctgagtgtagtagagtatctgtactagaaccataaagttctatctgatggtaaattatgtataaaactaagataaaacagataattatgctctatctcatatctactgaaagtagaaaaggaggaagagtgacacttttaaatcaaactgctctagttttagcttagtggatggttaataaacacactgctttacgctgaagtgatcagatagctatttctacagttcagaagaacttaaaaatcaggttttaaagacaaaagaaagcagactcaaaacacagacaaagcagagaagaaaacaatgcccatgagatggtcactatttagacagtattataaaaagctaaagaacacttgggctttacttcactttgatgtcttgtactaaaaacaccttccccaaactaaattcagaggggaggaagttaagagcttcaggtaactttaaaaccagtcttgggcttggtaagataattacttaaaataatcgcctcacattttaaaacagatcatcttcatctgactcttccaggtactttataggtttctttgcccgtacagattttgcccgaggagccacagctgagtcaaagtccatatggaagtcatcactctcccccttggatttctaaaagagaaaagcccaggtaacttgcacattgtaaatctgacaacataattgtaatgtaaaaaaatgtatcaagacactatattcaaggagttttctattttctaccaagtaataagaagcagatctaaggccaactcttccattgcccaaataagtggcatatttaactttgttaaaactaaatatgtacagtaaaagctaacagaatatgagagttaattttcttaaagatatgccaaatttttaagagcaatggcttagttacgtgtttcagaacatctacagcaaaaggactgactaggatcaacactcaccttgcttgtgactgctttcgaaacaattttctcaaaattagagtcagaatcatcagaagtggatggcttccttttgcggcgattcttggttttggcaggatcaggcttttgagagacaccagaattcaaagctggatcccttttagttccttttggggcagccctttttttggcaccggtagtggaggtggaagactgacctgcaattcaatacaggcatttgtcacagctgctctttttttgagatggggtctcactctatcgtccaggctggagtgcagtggtgttatctcggctcactgcaacctctgcctcctgggttcaagcgattctcctgcctcagcctcctgagtagctgggattacaggcgtgtgccaccacacccggctaattttttgtatttttagtagagatgggattccaccatgttggtcaagctggtctcaaactcctgacctcaggtgatccactcgcctcggcctcccaaagtgctgggattacaggcatgagcaaccgcgcctgacctagtcacagccactcttagatgaattgttctcattgcgaactttcttcagcaatgtgatgactgtatatttaacataggaaaagacaatctaagagaggtgaaaacagagaatcaaagtattcttaaacattctatttttttttttttttttttgagacagcatcttgctctatctcgcccaggctggagtgcagtggcacgatctcggctcactgtagcctctgcctcctgggttcaagtgattctcctgtttcagcctcccgagtagctgactacaggcatgtgccaccacacctggctaattttgtgtttttagtagagatgaggtttcactatgttggccaggctagtctcgaactcctgacctcaggtgatccacccaccttggcctcccaaagtgctgggattacaggcatgagccactgcacccagccttaaacttaattcaatttcaagaatacgttttacgttaaacattgcaattgcttataaatcctatccttgtcacagaaatgaactagatgaagcctggtactgagagaaactcactgattttaaacatttggactaccttatttttggagacagggtcttgctctctcactcaggctggagtgcagtggcttgatcatatagctcactgcagccttgaactcctggcctcaagcaatcctcttgttttagcctcccaaagtgctgggattacaggcatgagccactctgcctggcttttgttttgttttttgactagtcaagtgcagtagtgagaaggagggaaaagagtagaacaaggagtttgatctgtaactgaacaatcaatagagataacttactgttttggaacagccttgactactaattttgattataaagatcgaaaagaaattgcttccaattggaaaacatttaatctgtaatatcaatagtaagttttggcaataaaaaaattgaaatagacacgtggaaaccagttaggtaattgcaacattaacccatctcaaagatttaggcttactttttgctgctgtcttcttcactgtcacattctttttaggaactgggtttgtaatttcagtttcatctgggaaatgtgtagcaggagggcttgaagacagtggtacactgcccttaacatcatcagcttcaaggtctattatttcaaatggaaaggaaaatagtacatttaagcaacacatgaaaatccattttctgctttgtccctggtatgaattcctatttaaacaccaaatatgtgacttttctggaatatttaaaacatactcttaaaactttgttctaatttctgaattttttatcagcaagaacagtttttattttttgtatctctagcacctagcaaagtacctggcaagcactatgattacttttagtatactgaatgcagtacctatttacatgtgaaactaaacccagtgaacagtatcaacataatgttaataagaactcaaatttatttccaaaggaagtacttggataatgtagccaggattagaacccagttggatctgagtgtcccagtaaggcagatgtctcactacttttacttaaatacatacctgacacgacacttttctgtggtttcagttctttgttactaagtctagaattaaaaaaaaaaatcctgacaaccaattctaaatgtgtcaagcaaaaaacaatatattagaaacaatcatgacaaaacccatattagataagatacttgctttggggaagttttggtcttaggtggactagcatctgatgggacaaaatcttcatcatcagttttttcatcaaaatctgagaaatcttcatctgaatccaaatccattgtgaattttgtttttgctagtaaaaaaaccatatacaaaaaaatcaaagagggtagtaggagaaacaattcataggttgacataacatttcatgaatattttagtttttaaatctcctgaaagatgcttcagtgtttcaaagctttaacataatttactgctctattaagacacagtaatttctggggcaaagtaccctgaagtatattggccattccactcttacagtttatctataatgttctttagttttccttacttgctgctctccgtggctctgtttctcgtggagggacatcaaaattactttcgtcactgctcctatctgattctgaatcagaccagggatttctcttctttccttttttgattggcttaaatgccaatgtagtttgtttctttgtctttgtacctagaggggagatagaaattaatcacctttatatattagacccacttttctccatctatcatccatccatccttcaaatttattaactcctgtgatagttctgagaatacaatcgtgaaaagagacagatatggtctctgtttttgtggtgcatatagcttggtcacttaatctcataaataaatgtggccgggcacagtggctcatgcctgtaatcccagcacttagggaggctggggcgggaggattacttgagcccaggggtttgagatcagctggggtaagatataagaccctgtcttggctgggtgcggtggctcacacctgtaatctcagcactttgggagggtgaggtaggcggatcgcttgagctcaggagctaaagaccagcctggtcaacatggcaaaaccccatctctacaaaaaatacagaaattaatgggcatggtggagtgcgcctgtggttccagccactagggaggcggaggcagaggcaggaggattgtttgagcctgggaggtcgaggctgcagtgggctgtgatcatgccactgtactccagcctgggagacagagtgaaatcttgtctcaaaaaaagaaaaaaaaagaaaaaaggactgtctctacaaaatacaaaaaacttttagaaattagctagtcatggtggcgagtgcctatagtcccagctacttgggaggctgagatagaaggattgcttgagccaggatttcaagaccagcctgggcaagagtgaaaccctgtctcaaaaaaagtagatactcaaggacatatatagctcaatcagtggaacagaattgagactccatacataaaccttaacatttatagtcaattgatttttgacaagggtgaagacaaacattgtagaaagaagtctttttaacatatgatactgaaataattggatatctacctgcaaagaatcaggttggacaccttccttacaccatatacaaaaactaattcaaagtggatcacagacctaaatgtaagagctaaaactataaaatgcttagaagaaaacacagaggtttaccttcacgggcttagcaaaatgggaggccgaggtgggcagatcgcttgaggtcaggagtttgagaccatcctggccaacatggtgaaaccctgtttctactaaaaatacaaaaattatttgggcatggtggtgcgtgcctgtaatcccagctcctcgggaggctgaggcaggagaattgcctgaacctagcaggcggaggttgcagtgagccgagatctcactactactgcatactgcatgccagcctgggcgacagagcgaaactctgcctcaaaaaaaaaaaaaaaaaaagaatgaagtactaatatatgggctgccacatgggttacccttgaaaatgtgttaagtaaagaagtcagctccaaaagaccacatattatatgatttaatttataggaaatgcccctagattttttagtggtcacccagtggagaggagttggtggcaaatggcaaatgattgttaatgagttcagttttcttggggggcaataaattgtattaaaactgtttgtctatactaaaaccactgaatggcatactttatttttatttttgagttggagtcttgctctgtcacccaggctggagtgcaatggcacagtcttggctctctgcaacctctgcctcctgggttcaagcgacactcgtgcctcagcctctcgagtagctgggactacaggcacgcaccaccacactcaactaatttttgtatttttagtagagatggggtttcaccatgttggccagggtggtcttgaactcctgacctcaagtgatccgccagcctcagcctcccaaagtgctgggattacaggcataagccatggcgcccagccaaatggtatacgttaaatgggcaaatttggcatgtgaatatctcaataaagatgtttcaaaaaaagtagacagtaaaggcattatcaaatgattaacagaattattaattctatttagttcattgagtggacattatttatatccgaagcatgatgttgaactctagagatactacaaacattactaatatgtagtcacttttcttaagaaactttgtatactagaacctcgtaagtggctagaaaatgaaatctaataaactgggtattttcttagatcccaattaaggaattcaaattaacaaactacttcattacaaaatattttctataatgaatcaaatcccaaggacgatattaaagaggtccaggccaggggcagtggctcacgcctgtaatcccagcactttgggaggccaaggcgggcaaatcacaaggtcaggagtttgagaccagcctgactaacatggtgaaaccccgtctctactaaaaatacaaaaagcagccaggcgtggtggcatgcacctataatcccagctactcaggaagctgaggcaggagaatcgcttgaacccaggaggtgaagattgcagtgagccgagattgtgctattgcactccagcctgggcaacaagagtgaaactgtctcaaaaaaaaaaaaaaaaaaaaaaagaggtccaagtagaattgagatacagtcctctttcacgtttctcaattcaacaaaaaggttttgaacatctatgtggaatgtactaggtaacaaacacaatttaatcttcactttataccatttttctaaaaatgttgtaatacctggttctcttttctgtttcttttctaatctttgttttaggccttctagttccacaccatcttcttgagggcttccttcagtattttcattctaaaagatagcaaagttagggttggatatagaataaattctgaactatgggattagagattttatacatttttggctgggagcggtggctcacgcctgtaatcccagcactttgggaggccgtggtgggcagatctcttgaggtcaggagttcgagaccagcctggccaagatggtgaaaccccatctctactaaaaatacaaaaattagctgggtgtggtgatgtgcccccaactacttgggaggctgaggcacgagaatcgcttgaatacgggaggcggaggttgctgtgagctgagatcctgccattgcactccagcctgggtaacacagcgagactccatctcaacaacaacaacaaaaaaattttatacatttttttttcaattttaagtggacatatgcatcaatattttatgcataatatttttaagagtattacctcttttttttttttgagatggagttttgctctgttggccaggctggagtgcagtggtgtgaccttggctcactgcaacctctgcctcccgggttcaagcgattcttctgcctcagtctcccgagtagctgggattacaggcgcctgccaccatgcccgcctaatttttttaatttttagtagagacagggtttcaaccatgttgggaggctggtcttgaaccactgacctcaagtgatccacccaccttggcccccaaagtgctgggattataggtgtgagccaccacaagagtattaccttaattttctttttatttttcttttctgcctctgctttcatttctatggttattcgtggaatgactctttgaccacgcggagaaggcaaaacttcagccatttgtgtttttttccccttggccttcccccctttcccaggaagtccgacttgttcatcttgtttttccttggcttcaacagcctacagaagggatataagaaagcaagtttaaatgttaacaaaaacattacaatatctaaacacccaacagttaaactgatttcattttgttacatcttaaaaactagtgataaattgctccataacctagtatactatcaacaatagtgaagatgtaattaaaacacaccttgaaaaggaaggtgtggagacagaaggactgggttttattcctgattctaccacttaacctttttgaggaaaacaagggagaaactaaaaataaaacatgtatatacatatatatttgtaaactcacatacaaaatatgaaaggaagtgatgcacacttatccaaccaactgattacaatgagctaggcatctatactgaagtgcagtaatacaaatttgcatgttaaatttaagaaataaagcttttggtggttttttttttgtttttttttttttaagagacacgcaggctgagtacaatggtacatgatcatagttcactgcagccttgaactcctggtctcaagtgatcctcccaccttggcctccggagtagctgagactataggcccacaccaccatgcctggctatttaaaaaaaacattttgtagagatgaggtcttgctacgttacccaagctggttttgaactcctaatctcaagtgatcctcctgcctcagcctcccaaagcacattgggattacaggtgtgagccacagtgctggccttttttcttatgttaaaataatgttgagaaacaaatgttattaggaagatttaagtaacaaataaccttctgaaaccatctggatagccctgctttctcctttttttttttttttttttagatggagtcttgctctgtcacccaggctggagtacagtggcgcaatctcggctcactgcaacttctgccttctgggttcaagcaattttcttgcctcaacctcctgagtagctgggattacaggcggatgccaccacacccaactaatttttgtatttttagtagagacagggtttcaccatgttgtccaggctggtctcgaactcctgacctcaagtgatctgcccacctcagcctcccagagtgctgggattacaggcatgagccaccatgccctgtggctttgtccttttaagttgacttgggggactgggttggtggtcttcttccacatttaggctctttttatcttctcagtcctaatatgttcttccctttatcaaaaatcaactcctgctcttttctttttttgtccagaaatgtctgaatgtctgggcagtctcctggtatcatttactgtattctaaatagtatttttttttttttttttgagacggagttccactcttgttgcccaggctggagtgcaatggtgtgatcttagctcacagcaacatctgcctcccgagttcaagtgattctcctgcctcagcctcccaagtagctgggattacaggcatgtgccactacgcctggctaattttgcaattttagtagagacagggtttctccatgttggtcaggctggtctcgaactcccaacctcaggtgatctgcctgcttcggcctcccaaagtgctgggattgtaggtgtgagccaccgcacccggccttgtattctaagtagtatttaataatctgtccctttttttttttttttttttttgagacggagtcttgctgtgttgcctaggctggagtgcagtggtgtgatctcggttcactgcaacctctgcctctcggttcaagcaattctcctgcctcagcctcctgagtaactggtatgcaccatcatgcctggctaatttttgtgtttttagtagaaatggggttttaccatgttggccaggctggtcttgaacccctgacctcaagtgatccacccaactcagccttccaaaatgctgggattaccagcgtgagccactgcacctggccaataatctgttcttttatacgctatttggaatttatccttatgcctcttattttctttttattgccaattgtgaactatcttgacaaaggtatactgctggaatatattatttcattaataaaaattctaacatgggcattataaactacatacctccaattcttcaataaatgtagccaagtcttctttccacaaatctgatggactctttctttttaatgtgtccagctcttgttccttcataagataattacaaaattgagttaatatatgtatacaagcagcattttcatgcaacacacaattttacttttaccattagaatagaacaaaactaagcagcatgtaccatcctactatcaactcactttttcatttcttagcctgcagagttcatctttcttttccttggttaaataccaaaggggcatatcaagaagatagttgaaggttggtccagaatctgttacggagtcactcttttcagtttccttttcgttgtcactctcttcattttcttcttcatctggaacctaaaggattaattaaaatctagctttattagaaaatgtgaaacataaacattgtacaatacatagtctttaacaatatagaaaagtgccacccaagattaccttttgctgggcttctttccaggccttcacaggatccgaatcatatcccctctgaatcagaactttaattaattctttcttaggcttattttctatttttaaaaaagtaaacagagataatgattttgagtaatattttaggaaggggataaggttttacacaagtcaaaagtttaaaactggaaattaaactgtcttcgtgcttgcataaatttgtatatcccggtatacaggcaagtctccctaaaccattgacaaatgtaaattaccacaagggggcagtcaaatcatatatgatcaaatcatttttttttggagacagggtctctctcactcttgtgtccaggctggagtgcagtggcactacctaggctcactgcagccttgacctccccagctcaagtgctgagattacaggcatgcgccaccacacccagagagtagaagccattcgtaatcttcctgcctttttttttttttaccatcagatttattatctcttctctgtctcttttattttctgttcctgtagacatgattagtgtatctattctcttggtcaatcagtttatgcaaggtcttctagctctctattctcctcatgtctaattgtcaactaaatcttgatttctcaagatgctcagtcaaggaaacatcatctctttcaaactataaatacctaatcagatattttaaagaaatgcgtgtataagtgaccaggtgaattaaatggattttgcctctttctccaccattactctcaccaaaaatgtttaaagaaagtttggcgtaactagagttttagtaagcagttattattcccaaaacataccaatgattattttgccatctattttctctaagataaagcgagcctgattattcagtttagcagattcagcaccaagcattcctaggagccattcttttcttaatccataatatttaagtctgagttcaaaaaagtctcttagaatatccaacaccgtgtcatatttctttaaacagcctacgtggtcaaaaagcacctgaaaaaggaaaacaagattagagccaagaatagacaaattggctaaactttataaaggtagactaagatatacttttaaaattgatattaatctttaatataaattgaaacgtgtacatctcacaaaacaaatacataccatagagttgcatgtgagactagtttggagtttgaagactttgtgtagtccaactctctctgcctctgccagtttttcttcagtcatcttcacaacaaatttcacagtggtatctgtatggtattccctatagtctgttatgagaggaggtgtcttctcggtgccattcaacatgggttctagaacttgttctttgtatgtctaaagaaagaaataatcctgaagtttctaaaatataggcttctgaatagtcaacagcaatagtacaaaaggtatttcttttgatcacaaacctaaaaaagaaatccataattatttacctgggtccatgttctgacgggaagctctgagatttcaatggttgtagaattaagaatagctacttcaccactaatcacatattgatttggagccagttcttcaatagtacccttgaagttcttgtaacttggaagctaaattggcatttaaaaaaacagtatgttttctaaatgtgatactagacggaaatcacaacagcgtttaacaataaatctaaagtatgaaattaaattttatgtttgcatcatctttaatcatacaatctattcaactgaaacccaaggaaaagttaaggctcttaacacacacagaatacttaccattggcaaaggttcttctccatccatcaaacgcctgatgttatttacaatttcacgcacatcaaagttggggattttgcaggaccacccagtaccgattccttcagcaccatttatcagcaccatgggaataataggaatgtaccattcaggctcaacacgctggttgtcatcatataaaaacttcaacgtgtgatcatcttttggtggaaataacaatcgagccaaagagctaaagaaaagaaacaaagaatgttattttacaaaaatactgaatttcacacttaacttttatggaaaggacatgtattatacatgaaaattatcttggttttacttgctgactaatatacatttaacaatatttattgagcacttgctatgtgtcacgcacatggacataaagtctcaatcctcaaggagctcacagtccagtagaagtttgcaattaacacatattttgttaggtggtgggataaacaagagaagaaaaagtgggaaagtgactgaagaggtgctaaggaaagttaagccgtttctgataggaaaacatttgagcagagaaaagacactgagggcgccaggtgcagtaactcgcgcctgtaatcccagcactttgggaggctgagggaggcagatcacctgaggtcaggagttcaagaccaacctggccaacatggtgaaacctcatctctactaaaaatataaaattagctgagcatggtggcgtgtacctgtaatcccagcaacacgggaggctgaggcaggagaatcacttgaacccaggaggcagaggttgcaatgagccgaaattgcgccactgcactccagcctgggcaaaaagagcaaaactccatctcaaaagaaaaaaaaacaacaaaaaacaaactgagggactgaaccatgtggatatctagagaaagagtgttgcaggcaaaggaaccagtaagtaaaaggccctgaagaggaaatgtgctcggtatatttgagtataggccaaggacagtgtggctggagaggagatggtatgagaaggaatcaaaagacatggaaggtggggacacggatcacataatgtctggttagctaaaataggtctttagattttactctgagcagttgaaggttctgaatcagagtgacttattttttaaaaaataattggctgctttaagaaaagatgatatgttacaatagtttagatgagatgggggtggcttagtatttttccaatgcagatcctataggattggctgaggaactggatgttaagtatcaagcaaaggagtcaagggtgacaaggtttttagcctgagcaattagaaggatggcatggcattccatttactgagacaggaaaactaaggatttggttttagacttatgtttgagatacttaactagatatccaagtgggaaatgttaagagggcagtcagacataaaagttgggagttcaggggagagaccaagactggagatttaaaggtatagaacggatgaatgggagatcatttgggaattgagtgtaggcattggaaagagatctgatgaaggagccctggaatgggccagtatttagaggttgggaaggtgagaaggacccagcagagaaagctaataaggtagaagagaaccagaagagtctacagtcatagaggccaaataaagagtttcaagaaggatggagcaattagtaactgtttgaatgccactgaaagggtgactgggatgacagctgaaaattgaccattcataatatactttccataggcttgtaaaggagtaaaatttcaattgtgatatttaggaagaatcaaagtctcctttactcagtcccaagctctacatcaggatttctcaaccttagcataattgacatgttgcactggataattgttatgggggggctttcctgtataagcctcacccctggcctctgccactagatgccagtatcttctgattaactgagtttttgtatttttggtgaactaaatctcacattgtttcaaaactggaaatggcaagtcactagaaagtgaaagcatacctacctgagcattgtaaagatgtatcgtggactagcagaatccttgccaccatgtagcctggtaccaaactgaccaatgggctgcaagaggtttagattattgctacccacaaaattctgagccaaattgataatggtcatcattagtgacatctgtggggaaaaaaagattcattaagctgaggcttttactaatacaaatacattatgacttaacctcactataatcctgtaacattttgtgaggtctagttgtttagtgactttcctcagattaatagatggcagaaatagtacttgaacctacaacttctggctccaagtttagggctgccgtccaacaatttctattaaatcccactcaactttgaaggcatagttcttctccttatcctcagcaaaatgaaatatttcctcctttgtgttacaatgctgtgttcatttctattctagcatgtatcactttattctatagctgtgtgtgtattggccctctggctaaattgttattatatcttggggataaggaacatatttttatttatttttgtatacctggtacatggtaggcattcaacaaatgttcgttgggtgaaaatttattgtatccctactatattttgattgaaagcaacaagacaaccattatatttaaaattctagaaacctgtaggcaatctagttctttaaaactgttttacataattaatgcaaaaagtaatcacaaaacattggtgtaaagtcaaacaattcagacacatataaaaagtgaaagttgccctttccagttctcaggggtaactaaagtgaacaatttggaacatatccttgtagacatttttagttattgttctgtctctttttttcctcacctgagaatagaccctggatattcctcagtgtcagtgcacacagttttactgaagttacagcactgattccatgcatacatgtgtcacaatttattataacaattttcaaatcagtggaggtctaaattttgacatcacaaagttataataaacatactaagcattttttaatgtagacctttgcagacttatgaatatccctgcaggaatattactttcagaaatcaaagggcaagcagttttattctttcacaggttttaccaacttgttctttactatgaatatatgagcttatactttcaccaaatctgttttgagaatgactctgcagggatttctgatataatgctttctggaaacatggattgtgtgtttacctcaccatgatgataagaagacatttcagccactgatccagctaattgggcaacctttacttctcgcttgtcattccgtttgaagcaagtaaacaaaacctttctctgacctggtttcaaacctttaaaatgaaataagagcaaacgtaagtatcctcaatttaaccaattttggaatttgatttccatcttacaatgaaaacagactaacaaattggaactcaccatccaccatagaagggatagatctctcgttatcagaatttgagaacaagataagttccttgttgatgaagtcattatatgtcagatatgtggtagtttgtccatacaagtaatcctgaaggaccaaatagtattacatgagtctaccggtctaaacaatgctcaacacaaaaatcaaacagaaacctttcagaactaagaattatttctgtaattcttaagtctttaaaaaatattgaataatacagaaatattttatatgttttaaagataaagcaaatttaactgctgcacaactctatcatatcaaattttttactaaaataactattcagtaagtttaatttgctatagtatcaataccaaaaggtcagtctaacaatccattttgtggcatatatttaaaacttttacctcaggaagcccaagtaactttcgttgtcttctatcctccatgaaattagttaaccattcctttcgatcatctatctgttttttgctaaaggcctataaattaaaggatgaaaagatgtcactggtactaataggctaataggttccaaaatatccttctacaaagaacgaacaacagaaaaacaaaaatactgttttcctttttttttttttttgagacgggagttactgttctcttgcccagcctggagtgcaatggtgtcatcttggctcactgcaacctctgcgtcctaggttcaagcgattctcctgcctcagcctcctgagcccctgggattaaaggcgcccgccaccacgcccagctaatttttgtatttttttttttttgaaatggagtttcactcttgtggaatgtgatggcacgatttcggctcccacaacctccacttcccaagttcaagtgattctcctgcctcagcctcccgtgtagctgggattacaggcacgtgccaccacacccagctaatattttgtatttttagtagagatggggtttcaccatgttggtcaggctggtcttgaactcccgagctcaggtgatccacccgcctcggcctcccaaagtgctatgattactggtgtgagccactgcgcccgaccttttttgtttttttttttttttgagacagagtctcgctctgtcgcccaggctggagtgcagtggcaccatctcagctcactgcaagctccgcctcctgggttcacgccattctcctgcctcagcctccggagtagctgggattacaggcgcgtgtcaccaagcccggctaattttttattttttatttttttttatttttagtagagacggggtttcaccgtgttagccaggatggtctccatctcatgacgttgtgatctgcccgacttagccttccaaagtactggcattacaggcgtgagccaccacgcctggcctttttcctttttttttgagatggagtctcactctgttgcccaggctggagagcagtggcctgatctcggctcactgcaacctctgcctctcgggttcaagcgattctcctgcctcagcttcccaagtagctgggactatagctgcgtgccaccacggccggctaattttttgtatttttagcagagatggggtttcaccttgttagccaggatggtcttgatctcctgaccttgtgatctgctcgcctctgcctcccaaagtgctgggattacaggcgtgagccactacgctcggccaattttcgtatttttagtagagagggggtttcaccatgttggacaggttggtctccaactcttgatctcaggtgatccacctgccttggcctcccaaagtcctagaattataggcatgagccaccaagcccagccaaaaatcaaaattttctaaaatatctgattccttctctgggatatgcttactggaaacattctattctataaaacattcttttttttttgatacggagtcttatacaaaaatgtaaatgtttcaactggctaaagtagtgatttctaaaattagaatgtatataaaatacaactcaaacctaccaggctgatagcagcatcatcttcaggaccagaatatttgaactggatacgatgtcttttcatatctgcaaagtattctttagcttcctttgatgtgctggtgcccaaacctataaaaccaaaaataccaagttccttcatatagtcttgtacagggtgtataataaaatgagaagttctatatgggtttcattacaaacctttgtaatatttgactttccattttttatgatttggagtagaactcttccactcttcaaattcaggaaggctgtaaaatgccatttcttgcttgtttttagatacctgtgataaaaaacaatgactgtggctttgtacactgtggggtcccctgtataccactacatgtgacggggcttatatgtatatccaggtttgaggagtagggtcttaaaatatccatgatggtacttagaaattagcgtacctttacaatgggagtgataaattcctccagaaaacgatgtcgcagaagagagggccagttgtgatggataaaattaatcagcaagcctttgatgtgggaaccatcttggtcctagaaagatttgaaagccaaagttcaaaagaactgttaggctgggcgtggtagctaacatctgtaatcccagaactttgggaggccgaggcaggcggatcgcctgaggtcaggcgttcgagaccagcctggccaacatggtgaaaccctgtctccactaaaaatacaaaaattagttgggtgtggtggcatccgcctgcaatcccagctactcgggaggctgaggcaggagaatcgcttgaacccatgaggcggaggttgcagtgagccaagattgcaccattgcactccagcctgggcgacaagggcgaaactccatctcaaacaaacaaagaattgtttagaaataaaaaaatattatgactgacctactggcaatttgtcaaattttctatgggaatcaaaaaaggtctgttcaaatccagactcacttaacctgtatttgcaacatacatatgatataagcatatctgattagatgttgattagagatgatgaataaagctcctatttaactaatttattttcatggcaaaaaacaatgaaattaaattaagacatgcttaatttagttgaacaatctaaaaatttaataacaaatctgacctgatctgtcataatcattatcttcccataacgaagcgtcttcaatgaatcttcatcttcatagtttttcttgtactgaagacccacaatcttgatgatattgttaatctcagcattttccatgatctgaaatggacatataccaaaaaaagcatcgtttataaatttgaaaagaacaaagaaatttaacagtatatgttgcttggattttcttgagctccagtattttgagctattagcttataatttactacatcagaaaggtctgttaaaataggctacaatgtacctaatttctcaaaataagcacaaattgtctaaaatatattttaaaatgcctaatgagggaattaaatataagcataaagtcttgtattataaattagatttagattctgaagatcgtcttatattctacctgcttatgagaagcttctcgaacattgagtatttttcctctaagagggaaaaccccatatttgtctctcccaaccacaccaaggcctgaaacagccaaagttttggctgaatctccctcagtcaggataagcgtacactcagtggagtttcggccccctaaaataaaaatatacatattaatattagcacatttagttcaacctcaaatatactaacttgaacatgctgtttatagccttgtgataaaacacaatttactatataatgagcaaaattatttgttaggtaatagatcataatataaacattcttgttttatactccaaaataatcacctcaatattatttataacatggaaatgacctaaatcttccataataggaaacgggccgatttttaacaagttattctgttgaatatagttattctgtcaagggaaaaataaatatccgtggtatgccattaatgaataaaataacaactataagacttaaaagtttggaaacattattaaatatatacctgcatcattggcatcatcgagtttgggaattcccttgattctattatgttttacagctgaacacttcttgtttaactggacttgggccttaaacttcacccagtttagtatgctttctacaataccacagccaatggcctgaaaacgagaagattcatattagggatcatattagggaagaagggatctatcagaaatctagaatacaaatgagccttaatacaaataaaaatgattcaaaaattaaaaagatgtagaacaataatttctggatagagggtggcacatcttcccatgtcaggttatcaccactgagggagctgctccttttggttcattcgttcaataaatatttactatataattatattgtgctagcactgagctacttgttggagatatagtggttaaaacaaattagaccaggcacggtggctcacgcctataatcccagcactttaggaggccaaggtgggcagaacacctgaggtcaggagtttgagaccggcctggccaacatggcgaaaccccggctctactaaaaatacaaaaattagctggcgtggtggtgggcacctgtaattccagctactcgggaggctgaggcaggagaatcgcttgaacccaggaggtagaggttgcagcgagccaagatcgcaccattgcactccagcctgggtgacaaaagtgaaactccgtctcaaaaaaaaaaaaaaaaaaaaaaaaaagggtagccaggcatggtggtggtgaaatggctgtaatcctagctgcttgggaggctgaggcaggagaattgctttaacctgggaggcgcgggttgcagtgaactgagatcaagccacggcactccagcctgggaaacagtgagaagctgtctccaaaaaaaaaaattaaaaataaataaataaaattagacacaaataaaacaaattgagacacttgtcctcatcaagtttaagacacaacatagaagacagacatagctgggtgcagtggcttacgcctgtaatcacagcactttaggaggccgaggatggtggatcaagtgaggccaggagttcaagaccagcctggccaacatggtaaaaccccatctctattaaaaatacaaaaattagctggatgtgatggtgcatgtctgtaatccccgctactcaggaggctggagaatcccagctactcaggaggcaaggagaatcgcttgaacctgggaggcagagattgcaatgagccaggattacgtcactgcactgtagcctgggcaacacagcaagactctgtctcaaaaaaaaaaaaaaaaaagactgggcacagtggctcatggctgtaatcccaacactttggaaggccgagatgggtggatcatttgaggtcaggagtttgagaccagcctgaccaacatggtgaaaccctgtctctactgaaaatacaacaacaaaaaaattagccaggcatggtgatgcatgcctgtaatctcagctactcgggaggctgaggcaagagaatcactgaaacctaggaggcggaggttgcagtgagccgagatcgtgccactgcattccagcctgggcgacagagcgagactctgcctaaaaaaaaagacagaaataaaataagttacagtgttataagtgttatggataagcaaaaagtttgctaataaggtatgttcaatattatattggaaccaacttaggtggggggaagggtagaaagtaaaggctttcctgaggaaaggacaagacctaaagtagccaggtgaaaaggatgtatttcatgcagagggattagcatgtgaataaactctgaggaggggaagagcactgtgcttttcagtaatttaaaagcaacaggacaatatacgaaaaactggcactgagatgagttggagaagtaggtgtaattagattacagcagatctttcttgttggccaaattatggaatttggactttccctgagtggaagtcattgaaagatttcaaatgagagtgaagataaaaatgggtgttttaacacaaaagtcactcaaaagcattccaaggaaaggacttaaccagtatgaaggttaagaacctattgtagtaaaccaaaaaagagataatggtgagaagctactgcagcatccaagagatgattcttattgaccggattagagaggaggggaaataaaggaaggctcccagctttcttgtttatacaacctagaggttggttggggctttttactaagataggaagttgtttttttgttggagagtggggggctgcttgtatgggcaaatcagtgagtatggaggtaacaaattcaattttggatgtgttgactgaaagcaagtcttaggcatttaagtgagggtgtttgttaaacagctagattaattcaaaagtgatctaagcttaatggtaaaatgtaattgggaaatactgaaatatagacggtcattaagtctttggtaaatcagttaaagtaaagcccttttttacttccttttcagattgggaagacttggagaagctcactatgagaagaatcattgtttctgcagagctaagaagtgcaatggaaaataaagtcaggtgtttctatttttattttcctctaagtactcacagctttgataaatttttcactcaattggcatgttgatccaaagctcttgggttgtaaagtcatgttttcttttgtctgagagtcaaaggttgggttttcaattaaggcatttacaaaaatccacatgtgatttttcacctgcaatagaagttgatattaagccactaaaaatgtactcatgctttatttatagcctttctcttcttccttgactttagaaaaagaaaactgccaaaagcacatacctgatgtgcttttactgcaacaccacccttgttcttcttcttcacaacatcaacaagtttagtcacaatctgatcagctacataatcaacatgtctgccaccctaataaggaaaaataccaaactgtaaaactcagtatcctcaaaattataataatcaaacattaaaaactaatttaacctcctttatactaagctagcccaatattcaagtccactttatatattaaaaacaataagaacacatatatgtaaagataaatcatgattaataatttaagaataaaattaccttggatgtagcaatgctgttgacaaagctaatttgctgaaagcctttttcactcatagttaaacacacttcccacctgtggtttacttgttcatgtattactttcaaggagttaccagtttcatccaacttgtccttcaaatacatgtccacataactacgaaatccttttacctgtacaggaattaaaggtaacagtattaagaaagttattaaaaaataggttcaatgatagactatgaggactttccaaaaccaatgcaatgatgttcactgataggcataagggaatggtcattaaaggacacaggccgaggtgggtggatcacttgagcccaggagttcaagaccaccctgggcaacatagtgagatccccacctctattaaaaagaaaaaaaaaaattagctgggcatggtggtgctgcctgcatttccagctactccagaagctgaggtgggatgatcgcttgagcctgggaggtccaggctgtagtgagccgtgattgcatcactgtactccagcctgggtgacacagcgaggttatcaagaaaagaaagaaaaaggaaaataaaaaaaggacatgaaatatttattttaggtgtttctttgagaaagaaattccttcggtaagtttaaaatgagctgattaaaaaatgtggcataccattctcttttcaagaacatatgtgagaagtggtaagaaaatacatatggttgggccaggtgcagtggctcatgcctgtaatcccagcactttgggaggccaagacgggtggatcatgaggtctggtgttcgagaccagcctggccaacatagtgaaacctgtctctactaaaaatacaaaaaattagccaggtgtggtggcaggcacctgtaatcccagctacttgggaggctgaggcaggagaattgcgtgaacctgggaggtggaggttgcggtgagccgagatcgtgccactgcactccagcccgggcaacagtgtgagactctgtctcaaacaaacaaacaaacaaacaaacaaaaacatatgggaggggaaaaaattcaattttgcacttgacaatgattacaaaatcccttattatccttaacatccaggaaaatactcactggcagtttatttccattaagaaagactttgacatctttggtggatccagcaatatcatatgctcttctgaccattagtgcaacaatatctttgtccaggctttgcattttaaacttagacaaatcaggctgaaaggtgatacatgtataatcttctccattgaagggcttgagttccatctcaccagctcttcccatattatccatccatgtctatggaagtaaagaataggaaacatgaaaaattcaagtcatctcacaaactggaagtaaataacataaatttatgagtcctaataacctaatatatatgcttataattttccatacttcaatagcttataaattatgttaaattaaaccaatcattaatgccattataaatggctatactactaccatttatcattaaggtacaagacacttatttacttgcctgtttgaacattttcttgtattctctactggctgtttccacagtaaatttggtactgaatatgttacacaatttggctccatagccatttcgaccacctgggcaaataaatatgaaacactattttattgttactatctcattgacagctttatttcttaatcactggcagagctattcaattatagagatttatttccatatctttaaccctcatgccacagacagtcatttaaatatatatatttttagcaacaaatatgttatttcccctcaatactctacctgtcactttcttttcatcatcatcatagttactagaagttaggagctgtccaaatatgagagctgggacatacatcttttcaactttgtgttcaacaacaggaataccttttccattattccatatactaattaaattgttttccctaagaaaaaaagattgaaaattgtattttacaacacattaaacgaatgcttaacatttaaaaatatttaaatactattatttctaaaatatgtatattcaggctgggcgcggtggcctgtgcctgtaatcccagcactttgggaggctgaggagggcagatcacttgaggccaggagttctggccaacatgttgaaaccgtctctactaaaaataaaaaaaattagccaggcatggtagcgcatgcctgtgattccagctacttgggaggctgaagcaggagaactgctcaaagtgttggggttatagatgtgagccaccatacccagccctcaatttttttggcacttttcatatataccttctgaaattcagcaggaacatttcccaccatgcttagttcctgacattcctgaaataggagtcaagaggaaaaaaaaaccttttccaacacctgaatagacactgataatgttgaaaaaatacaaaattttaaaatgttaggataaacagagggaaatgatttatgcccaatggaaagaaaaggacaatctggaaacattattatacaccactcccactccttttttgagacagcatctcgctctgtcacccaggctgcagtgtaatggcaggatcacagcttactgcagtcttgacctcctgggctcaagcaatcctcccacttcagcctcctgaatagctgggactacaggtgtccatcaccacacctggctaatttttaaattttttgtagagatgagggtctcactatatggcccaggctggtctcaaactactcctgggctcaactgatcctcccaccttggcctcccaaagtgctgggattacaggagtgagtcatcatgcctattatacccctttcaagaggatcatctatacatctcgttcccactcaacaaagtacataaaaacaggctgggcgcagtggctcacgcctgtaatcccagcaatcccagcactttgggaggctaaggcaggcagatcacttgaggtcaggagttcgagaccagcctgaccaacatgcagaaaccccatctctactaaaaaaaatacaaaattagccaggtgtggtggtgtgcgcctgtaatcccagctactctggaggctgaggcaggagaattgcttgaacccaggaggtggatgttgcggtgagccgagatcatgccactgcactccagactgggcaataagagcaaaactccatcaaaaaaaaaaaaaaaaaaaaggaaaaccaatatcaatcataaactgccttgctctcaaataaaatgctgaaaacttatttcagttattttaagttaattcttggatggtactatattttagttaataactcgatatacattatggttcttgttctacatagtacttattatctataaaaaaaactaattaaaattagctcaactttttttttttttttgagacagagtcttgctgtgtcacccaggctggagtgcagtggtgcaatctcggctcactgcaagctccacctcccgggttcatgccattctcctgcctcagcctctcgagtagctgggactacaggcgcccaccactacacccggctaattttttgtatttttagtggagacagggtttcaccgtgttagccaggatggtcttgatctcctgaccttgtgatccgcccgcatcggcctcccaaagtgctgggatcacaggcatgagccaccgtgcctggccctagctcaacattttttaaagactatgatattgagtccttaggaaaatccaggtatactttgtcataatcaatcagactaacaaaaaagtgaaataagcaccctgatcacccactaagggacaccccgcatttataagcagaaatgtcagatcaaattattctctaccaccacctactggtttactgtttgaatagcatcatgagaaaaagttaaaactccagatgccagaatacttaaagcaattactgaaggtgcttgctcaaatatttagggattaggtgtcataagtcctgtaatttattttgaaatgatccagagcaaataggccgcgtgccatggcacacacccataatgccaacactggaggattgcttcaggccaggagttctaagaccagcccaggcaaaatagcaagaccccttcctctaaaaaaattaactaattaaaaaaaagatggagaaaatatggaaaaacgttggcaactgttggatctaggtggtgggtatccataggtttttcattttagcattctgcttttgtgtacttttctcaacttctgtttaggaaaagccaacttcaccagtaatcaaaatacatgcagctaacaatagcaacgagctacataacaaaaactaagcaaaagacgtacggatcaattgtgactctaatacaagacatttttgggtccctttgtttgttgtccgcagcattaactgaaagaaaataaaatatacatttgtaagaaattagtgttttaagaaacattctgtaactctaagtaagatatagaaaaaaaagttcccaaacagcacaggagtggcattaacaaggtgttaatttagcaatttttgtccatagtactgtttctacgagaagctcaacctcctgggctccaggaaaccagctcacctttatcaactgattgaaatgacaggagccctggctacagcaggtttggtagaaatgatactttttgtttttacttttatcttttttaaatttttatttggaatgatacttcttatgaaagatttgaccagatctttatattaaaggatttactcacctagaatctcatcaaagattttgtacaaaccaggaacaaaagtgacttccctatagttaatgccaacatcttcatcgtaaacccacatttgctagaaataaggcaaagaaatactgttatttttattctatattcattgttctgttatcatgattaccataaagtgttcatattaagtattaccatatttaggccagttccagtgacactcagtacatgagagatacagaaaggtcacactcagtacatgaaaggtacagaaagaagagtatccatttcaactactaggttaactgcctttgatgagcttgattttacctgggtcactaattccacagaaccaatgtaggtgtctgggcggagcaaaatatgttccaattgtgttttcttttgatagattctttcaacagacagtcttttcttagcatcttcatttttctttattttgttgacttgcatattttcatttacaggctagcaattaaaaaaaaagagagaaagaagggaatttttaatcataagtttaccctaaactaggaacaaaatgcctaccatagtgagatgtcaacatgcattgcaatctgttagtaggcagtggtggagttgccagttttgtacaaataggacaatttaaattcgctgcggccaggtccccaggtgtcaggttaaacagacacatattatctcaccaagtgggtctgtctggaaacctcttttcttgagcaacatggtagatgtcatcaataaaatacacccacttctttcagttcctgcatacattatttaccgagtgcctattattataaattatttacggtgtcccgagcacacgacaccgtaaataattctagttcggcagcagcagtttgggcggctatccgttcaatcccttggccacctgagcgttgtgaactcaggaagggggcgcttttgtaagctggccagctgctccagagaaacactgtgctaggctctgccctttccaagatcggggacattcaagaccgttttcaagcagcgggcaggaggggaaagcatctgtacgcgcgactcaataacgtcgcacccgggccgctgtaacatggatccactacgggaccaacggactcctgcccctagaaacagggcaacaacgcacgacaccctggaagccgggtcatacttcactactagcaccagaaggggcttccgcctctccacgatcaccccggaaccgggaatggagaatatgggctcccaagccggtcgccggcctgaccgcagccccagagcttcacccgtcacgggcggccagagagatgcccgggccgcgcggaggctccaccgccagtcccccccgcgagccgtacctgcaatggtgacacttccatggtgacggtcgtgaaggggctcaagaaccctgaaagcgactaaacaggcaggaccccacgagaccacccccgaccaagccgcttctccacagacgcgcgtcggttaggagagctccacttgaaccttcctttagcccgcccgaagcagaccagccaatccctgactcgctctcaccgtctccgtccagaagaaccaatcgtagcttgccttttatatccacctatgaacggctgagttggccggggtttgtttgaataaaccaatcaggttagggaggcgggactagagaggcttcaaaaggcaccactcggcgtcatagcggagagattgacagggaatctggccaatgagaagggctcacttgttttctcgtgcggaaagcttggaagagatgggctttggaagcgggaaggggtggcctgaggcaaaagtgtgcaggagaaaagcaaaggatgtttattctccaggaactgccaatctatttaagatccctgaaatctaaaaactgtcctctgttctgacgttgttagcgaggggaatgggagccttagcttcgttttcctgaggaaactgagtgccggctttctggacaggcagcctggctgcttggttgaagcgaacagattctggcatctgcctcaaccccgccccctttaccctcgaattcatttttcaaagaaataaaagtaggctgtgtgcggtggctggagtctgtattcgcagcacattgggaggccgaggcgggaggatcgctggagcctaggagttggagaccagcctgggcaacatagcgagaccccgtctctacccaaaaaggaaaaaaaatagccaggcgaggcatcgcacacctgtaactccagctccggaggctgaggagggaggatcgcttgagccccggggatcggagatcgaggcgccttgaaccgtgattgctccactgcactccagcctgagtgacagagcgaggccacctcaagagataaatacataaataaataaataataaaaataattaaaataaaagtgccacagttgtggtttgggggttccatatagtggaaggatgtagaaaggctttgcaaaatggagggcagcattcaggtccccagtagagcagcgctggactgcaactggtaaatcgaaagggataacttgtggtggtagcctcttgagctgagggtgggctcagccgtccggggctgaaaccttttccgcagccagctggccagataccctccgactggctacttttgctcacctccgtgaaccctgcagtccagaacagctgttccaatttgacaaggaaatgccaagactgaagcttttttgtttgcttgtttttttgttgctttttttttttttgagatggaatctcactctgtcgcccaggctggagtgcaatggcgcgatctaggctcactgcaaccttcacctcgcgggttcaagcgattctcctgcctcagcctcccgtgtagctagaattacaggcgcctgccaccacgcctggctaatttttgtatttttttagtagagacagggttttgccatgttgaccaggttggtttcaaacttctgacctcaagtgatctgcccgcctcagcctctcaaagtgctgggattacaggtgtgagtcactgtgcccggcgaagactgaagttttaaaattactcttacatataaatgtttgagtggattaaacaaagttattacccttacaagaagccagaaaaaaaaaaactgcacaatttgagtgcctactaattccagctgagccacctctttccattcattgcttccttcctctacctgggtttcagtcccaactcagcaatttgccattcgtgtcatttcgatggaggaagcctctcggtgcttccgtttcctctcctaaaaagaataattaactatgatctcagagtagtgtgagggttacatgagagaagtgtaaggtaaacagtgggctgacagtattaggtagcaggaattttccttaggctggtgtgacaattgtggatgtaattttttttttcttcttctaaaagaaaccagaggtcaaccattgttacataaccacagtgtgtcaagggagggccaatggggagccgtatgatgtggcaggaagccaaggatggaagttgcccatgggctaggggcactcggaaaccataggcatggtgcttcggcattgttctgctctcttgacctttggctccctggcctccagcagtctctgcgtgttcccagctctgctctgctcaccacatgtgttagagagcacaggaccaccaggggctcagagcagtggtagggaagcttggccagtagcctctgctcagccagaagactgaccaggccctgggatccagggcctgcatgccactctctgcaggacacccgagggccctgacagaaaccagccatgctggcttctacctcctagaacgcactacctccaaggtagtggggatggtgggcatgcttccccaaggatggcagctcagtttctgcagctcccggcctctaccctgtagctcatcccagcctgcagtgacccactgggcaatgaggcaacaggaatttaacaagcagctccagccctattttttaggggcccagctttaaatctgtcctgcagtttagctggatcctgtgtgtctttgttccaaaaacccagaagaagtactgtggagtcaaaaggactttggggaccgggtgtggtggctcacgcctgtaatcccagcactttgggaggctgaggtgggtggatcacctgagttcaggggtttgagaccagcctggacaacttggtgaaaccccatctctacaaaaatacaaaaaaaaaaattagccatgcctgatggcgggtgcctgtaatcccagctgctcgggaggctgaggtgggagaatagcttgaatccaggaggcggaggttgcagtgagccgagatcgtgccattgcactccagcctgggcgacagagcaagaccccgtctcaaaaaaacaaacaacaacaacaacaaaaaacacaaaaggactttggggccacacacacctaagttagaattcttcctgggtctcttggtttccccatgccattatcctttatcaaagacacagagggcaaaatgagatatgcaagtgtcggggacaatccttttccagctctgtagcacaaggtggtcttgctctggcccaccccccttctcttctgggtacaagctatttctctgccagtccctccctcttcccagagcctattgcagggggtcctgcaggacttgtggggactattgaagaaagaatagtggtgggggtctgggatgggtgggcctggaaggcattgcacacaaagagggaactgcagggccgggcacggtggctcacgcctgtaatcccagcactttgggaggccgaggcgggtggatcacgaggtcaggagatcgagaccaccctggctaacaaggtgaaaccccgtctctactaaaaatacaaaaaattagccgggcgcggtggcaggcgcctgtagtcccagctactcgggaggctgaggcaggagaatggcgtgaacccgggaagcagagcttgcagtgagccgagattgcgccactgcagtccgcagtccggcctgggcgacagagcgagactccgtctcaaaaaaaaaaaaaaaaaaaaaaaaaagagggaactgcaggtgcctgccagtcctgggaggcaagaaggggttgggggtagttccagggggctgtggtggggggaggggaaagataccatcctcattatccacccaccctgcccccactctgcaggggcccaaagtagctacctggacattaccccctccctcccccaacctgtacttgaatatgtggttgagtacttaaggcagatccctgactagggtatttgctgggtatatgactttgggcaagtcactcagtctcccttacaagttcagttgtagatcaaattgacttttatttgtgattcatgaattggggcagcccccattctacaaaatagaatgaaagcttccattgggcaatagcagaatggtgggttttgtaaggtgggaaccaggaaacagcaataggaaaaaacctgattggttaacatcaggtacttcaggttacttttttgtggagttaaagcagaggggacttccttattaaactgacttaggtagattggactctcctgttttcaggaaaaagtggtctgttttggaatctatctgcttctttaaagtttcagttggattacatggcatttagcacgaattactccatcttggtttggtctagtcttttggggcctagtgtaggagctcagttgaaaacaatggcctccataatttttttttttagacggagtctcactctattgcccaggctggagtgcaggggtgcgatctcggctcactgcaacctcggtctcccgagctcaagcaattctcctgcttcagcctctgcagcagctgagattactggcgtgcaccaccacacccagctaatttttgtagaggcgggtttcgccatgttggccaggctggtcttgaactcctgacctcaagtgatctgcctgccttggcctcccaaagcactgagattacaggagtgagcccccgctcccagccaacctcccataattttttttttttttttttgagacggagtctcgctctttcgcccaggctggagtgcagtggtgtgatcttggctcactgcaacctccacctcccaggttcaagcaattctcctgcctcagcctgctgagtagctgggattacaggtgtccaccaccacgcccagctaatttttgtatttttagtagagatggggtttcaccatgttggtcaggctattctcgaacccctgacctcgtgatccacccgcctcggcctcccaaagtgctgggattataggcgtgagccacggcgcccggcctataatttttaacaatctaaaatggggataatgggagtacctcctcctgctcttcatagggtgagctatcctcattatccacccaccctgccccactctgcaaaattcttacaccaaattcttagtgcattgtctggcaagtaataagtgctcaagacatgttaacaatgactacctctgctcctttccaggatcttccttccctgctagtcccaccaattccttctccaaaaccagctcaaaattctcctacccagggagccttctctgacagtctttttcattgaacctcctcaagtcttttgaggtatatttgcatatgcagataagttccttttataagtattctttggttgttttctcctgggttgtgtgcttccgttctttctgctctttggcaaggggagggaaggtcctggaggcatagtgtccccttcatggatctggaaggtcccctagaaagagcagcatttcttctcttttgcaggctttcccagcagaaggaggctggactgaaagtgtggctctggatttggggtttggagctggctaggctggagcccactgggaattcctggatgaggctgagccagcgccagagtactcaggtggttagggctgggccaagaagctctgtttaccttgaggttgacaactggcgagcctggtcagtttatttatttatttatttttatttgtttatttttttaccagggataccagcctctggttggaggaggccaagaaaacccaaaatgtcccatacagcctagcctctaggtggcccctgtcaaagaaatgtggacaaagttgggaggagagcaagggaggttacagaggggagcagttcaggaccagagttgagtaatccctaagtctgcacagaagttccctatccatcaaaaattttaaaatgtacacaccttgtaactcagcagtttaaattctaggaatactgaattcaatcaattcaattcagttgtggaattgtgcaaagatgtatgtacatatgtataggattattgcaatgttggtggttttctttttcttttctttttctttttctttttttttgagacggattcttgctgtgtcgcccaggctggagtgcagtggtgcaatctcggctcactgcaacctccgcctcctgggttcaagtgatttttcctggctcagcttcctgagtagctgggactacaggcacatgacaccacgcccagctaatttttgtatttttagaagagatgaggtttcaccatgttggccaggcttgtctcgaactcctgacctcaagtgatccacccgcctcggcctctcaaagtgctgggattacaggtgtgagccactgcacccggcctatttattgcaatattgtttttaatagaaaataactggcagcaagctaatggaatgaaatgatatgcagctattaaagagatggacattggtctaagtgtactgatatggaggtatctctaagatatactgttaagttttttaaaaagtgaggcaaatactgtctagagcataattccatttgagtaaataaaattatatatattatacatacatatatgtgtatacccatatgtgtatatattatatatacatatatgtgtatacacatatatgtgtatatatatggattgagtatatatatatgtatatatatatggattgagaatatctggaaggaattgtaaggaggtggagggaaaggaagacttcctttcttctttctttttgagacacagtttcagctctgttgcccaggctggagtgtagtggcaccatcatgactcattgcagcctcaaactcctgggctcaagcgattctcctgtctcagcctcccaagtagctgggactacaggcctgtgccagcaagcctggctgattaaaaaaaatgttttttttagagacgaggtcttgctatgtttcccaggctggtctccaactcctgggctcaagtggtcctcccagttcagcctcccaaggtgttgggattacaggcgtgagccactgcacccagccaagagttgctttttgtatttttcctcctatttgaaaatttaaaagtaaggtcacccttctcacccctgtcaccttcccccacctcattgaaggcaggcatacctgtctatacacgtttgtgtaagaatgtaatttttatagataaagatagattatcagtagacttgggaactcagtgctaagaactctgcagaaaagttaaatctttggaccaaagtaagggacactgtgctgtggtgagaagtcccagaccagctctgctgtccctagttgcacgagcttgggtaaatccccttctctctctagttttcagtttccccacctgtaaactgaagttgaggtaccccagctagaggattgggttgcaaaatgccttcttcacagtctcagagaggtgatagtgaggccgggcatggtggctcacgcctgtaatcccagcactttgggaggccgaggcgggcagatcaccaggtcaggagatggagaccatcctggctaacacagtgaaaccctgtctctactaaaaatacaaaaaaaaaaaaaaaaaaaaatttgccgggcatggtggtgagcacctgtagtcccagctatgcgggaggctgaggcaggagaatggtgcaaacccgggaggcggagtttgcagtgagccgagatcgcgccattgcactccagcctgggtgacagagtgagactccgtctcaaaaaaaaaaaaaaaaaaaaaaaaaaaagagagaggtgatagtgaaagcacttggaggaggtgaggcccagttaaccaatccagaacagtcccactttcatcttttcatattttaggttctgtgtaaaacttcattaaacacagggctccactgcttagatttttaaaattaatgggtaaattactgttaagggcttttcaagttctgacactgtaattccaaatatgacttttcatttattgagttggtttaaatcagggtatgcctgcagctttgtcttcctttcccccccacagagcccaaccagggctgcagaggagctcaagcccatcggggctgaaccctggtgtatggggaggcagaggagggccacggatccttttcactctttatgtgacatcccttcccccatctcgtggcctagtggtatggctggggctctgccagctccctaagacatccccaattgcccctctctggcaccagtgcctgccgatggcagctgctggaactggagcttggccttagttttatgcctgctggagacttgatcagcaagacctgggcaaacataatgagccccttgctgcttcctcacccctaaactctccagctccctacatccttcctctgcagcccacagaatggaagtggtaaagtagccctcccatctgacagcagaggccagggctgggcctctctgttctctcagcttttcacaccaggaaagggaggcagaactggactgagtatcttgatagtcctcaggctacttgaatgatcgccctcagtatgttttatttggtcactgtggaacatggaaggtcatcaccgaggaacttctgcattggaatcctctacctcggaagaggaataaaaaagtacgtctctggagcgtcttccctccgacgttatccggcagttgtccccccctgctgctatctccaaggcaatcagggccagtttatgtctacagggtccccttcactgacgatctgagacactaggcaggttggaaagggtggagtggtgctaggagcaaattattcacctgaagaaaatagaaagttagatccttctgtttaggattgaagaaaataatggtgtttcccaaaggcctggagttaagtgctgcttatgtggttttctgtcttccttcctgatcatgagagaagctacaggagcaggaagatgggaatcctgactgatacacactctatttccaacaatagttttgctgattatagtttgttgaatgccaattataagcactgcacataactttctccctaatctttacaacaatcctttaaactaaggcaactcaggcttgcaagagttaggcagtgtccccaagattgtgaatttctactgatctttcaagacacagatccaatgtcacttcctttaaaaaaaaatatttatttacttatttatgagatggggtcttcttatgttgctcaagatcacctcaaactcctgggctcaaggatcctcctgcctcagcctgcagagtaagctgggattctgtcacccaacacacccagctcaatatcaccttcctttgaagcttgctctaaccagccttggtttgtctttgttttcttggcttcctgtgcatttctctctattacacagcactgtgtgtttacccacaggtctcccacttcaaaccacaagctcttctaaagtcagggatttacttatttctttggtaccctcacctagtacaatgcccacccactggaggccttctgtgaatggtattattagcactatcattgtccacctggaggcagcacacccagctaccagaccccttgtgcaggaaagccagctctctggccaggtggctgggctgtcaaacccctaagtgaagggaaatgtccacacaagcctctgcttatgcccctatggaagccagggatgactgtaccagcagtttgctgcatcctctttggattcagtggaaggtacagtactcattgctggcatcagctgggctgtccttggggacactggggctatgcaggaacatctctaccttggactcaaagacccagtgctacggtttgaatgtgtccctcaaaaagcatgtgtggaaagttaatccccaacacaacagtgttggaaggtggggcctaacgggaggtttgtaggtcatgaactccgtgctcatgaatggattaatgacaattataaaaggacttgaggctgaggctgcaagtttgatctcttgctctcttgtccttttgccttctgccatgggatgacacagcatgaaggccctcaccagatgcaggccccttgatcttggacttcccagtctttagaactgtaagaaataaatccatgctttaaataaattatctaatctcaggtattctgttatagcagcatgaaacagactaagacacccagtgaggaagctgcaggaaagaaaacccagaaggggaaaaaggggtcagttgcaagggtctcagagaaagcttctcttgagtagggctgcatctcataggtaaaaggggagaggaattctccactagggctaatgaaccctgctcctagctgggaagtggataaaatgtcagcaggggtctgattgaggaaccaggttatgtctgtcctctagaagcggaggcaaaacagtcacaggggacagtcacagagtgtctctgtagacaccttccttcttctgttactgggggaacacctggaggcagaaggtgctaggggtaatgatggtggcattagaggcagtagggaggagggagagcatccacttctgccagagaactttgagagaagtggagcagatgaaacaatgaggggagtggcagggtattgccaatggcttaaattatgagcagataggtgagagaagagagggcaggggaggcatctggaattatttattctgagaagagaaagacattttcttcttcttttatttttatttttttgagatggagtcgctctgttgcccaggctggagtgcagtggtgcgatctcggctcactgcaagctctgcctcctgggttcacaccattctcctgcctcagcctcccgagtagctgggactacaggcacccgccaccacacctggctaattttttgtattttttagtagcgacggggtttcaccgtgttagccaggatggtcttgatctcctgacctcatgatccacccacctcggcctcccagagtgctgggattacaggcgtgagccaccgcgcccggccgagaaagacattttcataggcttcactgacatataggaattgacatgtgtggctgggcaccgtggctcacgcctgtaatcccagcactttgggaggccgaggcgggtggatcatgaggtcaggagatggagaccatcctggctaatgtggtgaaaccctgtctctactaaaaatacaaaaaattagccgggcatggtggcgggcgcctgtagtcccagctacttgggaggctgaggcagaatggcatgaacccgggaggcagagcttgcagtgaggtgagatcgcaccactgcactccagcctgggtgacagagcaagaccccgtctcaaaaaaaaaattgacatgtgtaagatcacaattcctggtctattggatgttctactgtacacactgcttcctcaaagccaagggaattaatccctaatggtaggaggtgatatttgacaggaatatttgaggatgttgttttgaggaggaagaggagtgtattagtcagggttctctagagggacagaactaataggatattatatacatatatatatatatgagtatatatatatgagtttatatatatatgagtttatatatatatatatgagtttattaaggaatattaaactcacatgatcacaaggtcccacaatagtccatctgcaagctgaggagcaaggaagccagttcgaatcccaaaggtgaagaacttggagtctgatgttcgagtgcaggaaacatccagcatgggagaaagatgtaggctgggaggctaagccagtctagtattttcacattcttctgcctgcttttatcctagctgtgctggcagctgattagattgtgtccagccagattaagggtgggtctgcctttcccagcccactgactcaaacgttaatctcctttggaaataccctcacagacacacccaggatcaatactttgcacctttcaatccaatcaagttgacactcagtactaaccatcacaaggaggtaaaagagaaagaggaaagggcagccataaagaaagggagccttggcctgaggacacgggcctcttctgttctctcagggagacccacctgagcatagatcacctttccaggtggactagaggctccaggaggcccctccaagcctctcccactatgcaagccttgctctctcttctatcctgtattgggaaggggggtagaatacaggataagatgagctctccagcccctggggaaccccccagggggagatcctaggggagtgaggtacagggttagtgagccaataggcatgactgagcatctattaggcgtcagtttccgaacacacagggatgtgtaggacacggtgtcatccatgtaagcagcatttgttgtaggaaaagatgcagggaaggatgggggaggggatgctaaagaaagagaaggaaggaagagactgaagaaacaaggggaaggggaagaaagaaagacgcagttgtcgattctctctctctctttttttttttttttgagatggagtctcgctctgttgcccaggatggagtgcagtggcacgatcttggctcactgcaacctttgcctcccaggttcaagctattctcatgtctcagcctcccaaatacctgggactgcaggtacgtaccaccatgcccagacagttttttatatttttagcagagatggggtttcaccatgttagccaggatgaactcgatctcctgacctcgtgatcctccatccttggcctcccaaagcggtgggattacaggtgtgaggcactgcacccggccatcaatgtctcttaactcatactctagttgtggcaatcggatatctagagaaagggtggctaaaaagctcagtgataagtgagcagtcacctaagataagttacaaggggggtgtcaagggaggtttcaggagggcttgggacagaggagtgggctggcagggtaggtggcttcttctcacctgtagacctggctggcctggttgtccttgaggagaccctggcccagaggcttcactggttcttgagctccatggattcccaggagcttgtctgggctgggcaaccctgaaaggcccagtgtccacagggttcctggcagcccagaaactcctgggcatctagggtggtcctggggcccttcatggccagagtagacctaaggtcctagtggtcatagagatcctggtctgccaggaggtccagaggcccaattccaccctgcaactggaagaagaggctggagtcatggatgtgaaccacagaagtaggggtgtgtattcgaaggtaggggtctcttacaggggcagtcagtggggccaagcctgggaaccctgctgggagtagagcgtgcacacgggaaagtgcccacggccctgagatcacttagggaaatccaagatggtcctgggggtggggctactgagttccaggtcctatcccagcacttgggtgtaaatatagagatggtctctatagttagagacaatatggtttcttagcttgagactcctgtcatcacctttaccccagacccttaattcacaggatcttcaaccacaattctacccaaataataccatcacctgtcgtccacccaccctactcattacccacccaccatccattcagccccatccaccattcactctcctccccacccactcaccatccacccatttgtctgcctaccgtcaactcaccacccacttcctaccaactgcataccatccaccctcaccgctggtctagctgctccttccaaaagtagtgctaatcaggagccacagagggtgctgggaggctagggtctctgaggagggtctgggggtcccctggggagttcctaaggagcagggaatcttaggatccctaaagctccctttcaccaggaaagccagaggcccattctgtcctggggtactcctctgcccctgctttccctgctggaacaaatgggacatgcagtagagatggaagcagggaggagagggttttctgtctcactccagctccttagtcttccttttgttcacccacctcccctccactgccatcccagaggatcccaaaggcccagagatttctcacccagggtggcacttatctgacattcagggggcccagcagggcaggcacatccagaaggtgagttgggagcaggatgagataggcttggaagagaggttagaatcaggctggcttttagattactaagtcccacctccccattgtacaaatgggaaaactaaggcccaaagagaggtgtaaccatagatgactgcaacggggcggcaagctgacctgggggatggggtgagaaagccagtgatgcctcctcatgtggtggggaatagggtcacatgaacctgtcactttctccctagctctgacattccacataaggtccttgggaggcaatagggtggggcccaagaagagaggagtaggagggggtggagtgctgtgtgcctctacccagcatccatctgtttccctgaccatctcaccttttcaggctgtacaccttctctccctcccctatcccatgcctgcttacttgtttgcctgtgtaggagccaggtactgaggagtacaggtcagtgtggcctgaaagagcctaatgaaactcccattcattagtggaagtcagggtggggagtgggggcaggggaccagcattccaggtagctgacccctgcctcggactttggactcagaacccaggggtctgacttgaggaacagcagaaacccatcctccagtccattgccctcagagggctcttgggtgctgctgggagcaagcctgatggatagatgtgggctctgagacttggtctagcttgacagctactacctcattctttcctctgaagaatgaacaaatgaatgaagagggagactttaccccagacccttaattcacaggaccttcaaccactcttctacccaaataatgccatcacctgtcatccacccaccacctactcatatctgttttctgatatctgatttcatatctgtttctaaatctctcccacctctgcaagtttttcatttcatcacatctattcacctgtctgtgcctttccatctctctgtcctgttccctctttcagcccctccctctcttggtttttcccttgctagtactccctcctcttctctctatcctttcactccaaatcatcatagaatcttagcatcagaagagacccaagagggtcataataaggacaccatcaatttgtaacctgctttctggtatacaagtctgtcattttaatagacagcctcatttgatcctccttaacagcctgccagagtgaagtagggaatagcatccccagtttacagataaggaaactgaggttcacagtggtgaagagacaagcccacagctaataaggacagagctgagatctgaacccttggctcggactgcaggaccagtgcagactgccccacagtttgtgcatcccaagctgggagcaaagctcttttccatttcaggctgtctggctttcccctggcttggggcccagcttctgctgctctttagatcatcatgactgggtgggggtaaggaacagcccacacagatctcaaagattactggctccaaacatcaagtctctgaaaatggtgcagaccaagggagtgaatccaggcttcaggagaggagacagaggctctgtggattaggagttccaggtgtaataggccttgttgctgggcctacccagccctgttcctctgccgtcaagttctctccagccatcaaccagtcatctttacctctctcaggccaaagacaaaaggagactgcagtgaaagaggcccctggcatggaaagcctgctgggctctgtggcttctctctgagaccctttcttcgcgtagctgaggttagatctggggcccgggatgcaccctgactgagggcaccagaactctcaggttagcgctagagctgggccagcagggaagacacaaccccctctgggcacacagaatctgacaactggagttggaaagacaagggcttctgtggtagcagggcccactgggcaggaggaaaaggtgctgattgggtttggggaaaagtctccaaggctgtgctgcctctggaggtggggagcgggaggtgcaagttggaggctgggtgtgaatgcaacacaggctctgttgtcccaaaaatgagtttgaatgacattgagttgcatgtgaccttaagcccatgtttttactacctggagccccatctataaaatgggtttatagggttaccatggtaatcaatgatcataataacaggcattgagccttactccatgccaggcactgtgtttagtgctttacacacattgtctcagtaggtttctgcacagccctatcaggctgggctggcattatctctcttacaactgagggcatttgaggataagagggaggatgccactttgccaaagtcacagagctagtaaatggcaaatccaggattcagtgcaggccttttggctccaggctcttaatctcattcacttggctggtcatggctaataactaacactcattgggcgcttaatgtttggcaggcagcattctcagtgttttatgcagattcattcatttagtcatcatagccacactataatgatgttcatttaatatgaaggatgaggacactgaggcacaggctaacttatcctggtttctgctgccaggaatccagcccaggcaggctgacttgagagtcagcactctttaaaaaaataaaaaggaaaagcctttttttttttttttcagtaaaaatggaagtataacatgcatacagaaaagtgcagaaatgagaaatgtctagctcaataaatgttcacttagtgaggttgtaactaaataatattacctgtaccccataaggctaccttcactcctctccccacatgtaaactttatcctgatttctaaaaatatagattagttgtcttagtctgttttctgctgctatagcagaataccacacactgggtaatttataaacaataaaagtttatttggcacatggttttggatgctgcaaagtccaagagcattgcactgcactgggatctggcaagggtcctcccatggtggaaggcagaagggcagaagcaagtgtgtgagacacagaaggaggccaaacctcatcctttttttttttttttttgagatggagtcttgctctgtcacccaggctggagtgcagtggcatgatctcggctcactgcaacctccatctctaggattcaagtgatcctcccgcttcagcctcccgaatagctgggactacaggtgtgtgccaccatgcctgcctaatttttgtatttttaatagagacggggttttgccatgttggccaggctggtctcgaactcctgacctcaggtgatccacctgcctcagcctcccaaagtgctgggattacaggcgtgagccactgtgcctggcaccgtttttttttttgtttttgtttttttgagaccgggccttactctgttgcccaggctggagtgcagtggtgcaatcacagctcactacagcctccacctcctcaggttcaggtggtgattcccccacctcagcctcctgagtagctaggactacaggtgcacgccaccacacccagctaatttttgtatttttcgtagggactgggttttgccatgttgcccaggatggtctcaagctcttgagctcaagtgatcctcctgtcttggcctcccaaagtgctgagattacggtgtaaacttcatccttttatcaggatcccactcctatgataactagcccactcctgtgataacaatgaatccatttatgagagtagagcccccacgacctaatcatctcttaaaggtcccacttcttaatactgtcacaacggtgattacatttcgacatgagttttggagaagacattcaaaccgtagcattagttttgcctgtttttgagtttatatagagtgatacagcagtaatcttttgctaacatatgatttgtctatatcgatggatgtatcaacagcatattcaagtcgagacttaaccattctactgttggttccatttctggctattctgaagagtgctgctgtgacactcttgaacatgtgttttggaacacacacacacacacatttctgctgggtatatatctaggggtggaattactggttgcttctcagtggttgtacaaatttgttttcttacaagcattatatgagaatccccttactccacattctggtattgtcagtattttatttttttacccatctggtgggtatggagtggtttcccattatgtttttccatgtgtatgtattaaatgaggcataactggaagcaggcactcttaccacctactccgtacagtttctcctaacaatcccatgcactgcgtatttcacagatgaggaaatggaggcacgccgttactccctttcctctcttgcagtcccctcacctttcctggaggcccttccctacttttccaagtgggattgggatgtctggtcactaccaatcttgagaggcccctcaggccaggatgttcttttgggaagggagaagaggaaggttgggatgaagtgggcaggggtaaggaggagagaaaggatgaggcatagacgctggcatgaaggatcctggctctggctatggaatgatggggccagaagagagtctgggcatatgcagaaggcatgactggtgctatctgtaagctcctactgctggtggggaaagggggaggcatgcagctggggagtaagggccctgtgcgcatgggtgttggagatcactctgaaggtccagcaaactctgggggcttacgagtctaaagtcttatgccccctctgtgggggcgtctctaagcctaaagcccttttggaggactccctgggttcagaggtcccttggtctctttaggatttcctaaggggaaggtggcacttttttcctcagggttggggaaacaggactcagggcctggaggccctctagggaatgtggacagggtgtctgctctgattctgggcctctgatctgtcaggccacctgccctctgactcaacaagcattaggggaagcagggcaaacgacttcccagcccaacctctggctctctctgctcaaagtgccctgtgtgtcgtcgtttctgcaagtgtcctctgcaagattttcccaggttgcactttcttcttctgctcctacccccatctttctcgagttctgagcccaaagctcacggtcaaagaaggctaagattgtagcaggcaataaatgtatttggcacaagtcttggctcaattacttgctagctgtatactcttgggttagcctcatcacttctcggggtggtgacagaactctcacagggcccaacatcattcacttggcttgtctcctgcttaagctttggacaatgagaaagcgctcctgttggtgccaattggcctggaagcgttgcaggctctggagtgttggaagccatgccagcatggggccttggaccatgcaaaaggaatccggaggtcctagattcctagattgccagagctggaagggccttcacaattcaacaagttgccttcccccattttacagatggccaaactgaagctaaggaacaggaagtggtcacaaagctggtgagcagctaagcaggatggcctggagatatgaaactggatcctggccagcccaactgtggatggctttcctctcccctccccctctcttgcctgggtgttcacctctggaaccatgtgttcccagggaaggacccaggctccatagtctgggactgggctggaccaggcctccctctgcactgtgttgtctctatggagatcctggctctcttgatctggtctctccaagtatggggccctggtgggcaggaaggcagctgtactgatacaccattgctcagcccacatctgcggtgactgtgggggtgccctgtctgggacctggatgtcagctgacatggaggggagctaagatcctctactcagtgtgggcacagtggacattccagggcaatcaggaaaggggctgggaggccaaagttatgaggaggcctggggcccagtcccctaccaatgccacctctgccctgatctccccacccagcttgtactctgtgtcagactcttttgcccttgttggcattagagtgctctgacagctgttttgaaaggcagtaaagcataggggctaatagtacagactctggagccagactgcttgggttcacatccctgttcttccacttacttgctgtgtgactctgagtaagttacaaacctctccatgcctctgtttccttgtcttaaaaacgggatggtgatagtgcctagttcacgaggttgctgtgaagtgctcatgagtgaagcacttagatccctatcctgcatgtagtctgtgactactgtgttaacttttttttttttttgagacagagtttcactcctgtagcccaggctggagtgcaatggtgccatcttggctcaccgcaatctccccctcccaggttcaagtgattctcctgcctcagcctccccagtagctgggattacaggcacacgccaccatgcccggctaactttttgtgtttttaggagagacagggtttcaccatgttggtcagtctggtcttgaattcctgacctcaggtgatccacctgcctcggcctcccaaagtgctgggattacaggcgtgagccaccgcgtccgtcctgctctttttagaaacaattttattttttatttttaagagaccaggtctgtctctgttacccaggctggagtgcagtggcactcatagttcactgcagccttgaacccttgggctcaagggaccctcctgcttcagcctcctgaatagctaggactataggctcatgctaccatagctggctaatttttttttttttttttttttttgagacagggtttcactctgttgcccaagctggagtgcagtgagctatcttggctgactgcaacctcgacttcctgggctcaagtgattctgctacctcagcctcccaagcagctaggatcacaggtgcatgccaccatgcctgactagtttttgtattttttttttgcagagacaatgttttgccaggttgcccaggctggtcttgaactcctgcgctcaagcgatccacctgccttggcctcccaaagtgctgggattacagacgcgagccaccatgcctggccccatgctctttatacagcctctcccagacacgacacttgcaggctgaagggggacactaaacccagtcttctgagagcctctagttcagtgggggagacacaggtcttgccaccagggggtctcagccatgtggagaagttacagttcccagcaggagaggggtaggagggagcaaacacttggtgcttactatgtgccaggcaatttggataggtctctctctctttcttgctgcaaagtcccattttccagataaggcctgaagctcagagagctcaagtaacttgttttaggtttcctagtgagcccagtgacacggctggggtcagaatccaggtcattgtgacactcacactgtgctgattcttgtagcatggaaggccattggctcaaggatcatctctctctttttattttttatggtgaaaagatatacatatatttagaattggacagctggactcagtttagacgatcccaattttgttggcaacatccaaagcatcgtaatcaggagccagtccaacatatgccttcttctctccatcaggctgaatcggggtgttgaccttggccacatcaatgtcatagagcttcttcacagcctgtttgatctagtgcttgttggctttaacattcacaatgaacacaagtgtgttgttgtcttctatcttcttcatggcagactcagtggtcagtggaaacttagtgatagcatagtggtcaagcttgtttctcctgggggcgctcttctgaggatatttgggctgcctccggagtcgcagtgtcttgggccgccggaaggtgggtgacctgtggatcttctttctttttgtggctgtggacacctttcaacactgccttcttgagttcggctttaagaggggcaggagattctttctttgccttcagcaccgtcttgtgaaaaaggatcatctctaatgaagactttcagcctgtatgccctgaatgtaaaactgaccacctgtggctctggatccccattgtgccccatatgaacatctcccagggcacctgcacacttctcagatttattttatttacatactatcgtccctcattaggcagtgagctccttgagggcagggggtgatcttggtcatctctgcatccctggtatgtagcataaagcctgtgcatattaggcgttcagtaaatctgtgttacatgaatggtaggaggtgcttggaaggcctctttcctgtgcatcttcctgcctccttggaattaacccaatgatgaggggtggagggacaccagaggatggactgaggggctggcgttgaggtgtgggaatctgtctcatctggcaacctttgcagattcccacactcacctgcactcatgcttcatcccaggcatgttgcgtgggtttgtccggcctctcctgcactcctgcctctgtgtcctggcaccttttctcctcttgggcttgctgaacagggcacatgtctggcattgggagcagaactactcttctccattcattttactctcacaagagcttcaagaggtaggatgggtggagatgatctacctccatgttacagctaaggtcagtcaaactccaagttcacgcaagttggtggcagaacagggtccagtgatgatcaaggaaggagatggggtggggaacgttttcttttctttttttctttttttgagactgaatcctgctctgttgcctaggctggagtgcagtggtgtgatctcggctcactacaacctccatctcctgggttcaagcgattctcctgcctcagcctcctgagtagctgggactacaggcacgtgccaccacgcctgactaattttttttatttttagtagagacgaggtttccccgtgttagccacgatggtctcgatctcctgacctcatgatccacccgccttggcctccctaagtgctggaattacagccgtgagccaccatgcccggcctgggggcagttttctgaatcaggcacaggctgggcttccccagggacttgaggaagctggttctgtttgcccttctccaaggcatatggggcagaagggtccccacttcatctatgagatggaatggagagaaccccagaatcttggccccagccatcactttccagcccttctgcagtcttgatggttgccagtaggtgccgtcagtttgcaactttttggtctgtcctgcaggtccggctgccagtcccaatctccctgcaatcatctctcagtaagtaggaggtagcccaatccccgtgaggctgaaagacccctgtcctgggggaagaagcaggaagagggtctctgaactgcatttcagcttggctgacctgcagctttctaggccgagacaaaaaaaaaaaaaaatccacagtgggttactgattattcctggacaggtacgcttaacctgaaaccagctccagtacagcagaagcctttgtagggaagaatgggtgggaattagcgggggcctgagagggaacctaggagatggatctttgctccaaatgccactccagggctcttctcaatttgggcaggattgggcaaggctgggggaatagggatcaataggattttacagagggtcaagccaggcccaacactagcccaagtagcaacactgggtgaattaaaaaagcatcccttccttaaaattcttttttttttttttttttgagacagagtcttgctctgtcacctggactggagtgcagtggtatgatcttggatcactgtaacctcctcctcctggggttcaagcgattcttctgcctcagcctcccaagtagctgggattacaggcatgcgccaccacgcccggctaatttttgtatttttagtagagatggggtttcaccgtgttggccagactggtctcaaactcctgacctcaggtgatctgcccaccttggcctcccaaagtgctaggattacaggcatgagccactacgcctggccttcttttttctctttctttctttttttttttgagatggagtctcgctctgtcgcccaggttggagtgcagtggcgcaatctcagctcactgcaagctccacctcccgggatcatgccattctcctgcctcagcctccctagtagctgggactacaggcacccgccaccacgcccggctaactttttgtatttttagtagagagggggtttcaccgtgctagccaggatggtctcgatttcctgacctcgtgatctgcccgcctcggcctcccaaagtgctgggattacaggcgtgagccaccgcgcccggccttctttctttctttcttttttagacagagtttccttctttcacctaggctggtgtgcagtggtacaattctagctcactgcagcctccaactcctgggctcaagtgatcctcttgcctcaggctcccgagtacctgggaccacaggtgaacgccaccacacctggctaattttaaaatttttttgtagagacaaggtctcactacgttgcccagactggtcttgaactcctgggctcaagtgatcctcccgcctcagcctccaaaagtgctgacattacaggtgtgagtcactgctgcaggcccctcaaatccttcactgccatctgggaaatgatcacaacagctctacaaatacacaatgattacaaggaatggtgccccactggagttgttcaacgcaaaacttgcacattgcaagtggcaatctcccaggcctgcctccctccacgagtgggtctgaatgggcctgagaggcaaacatccaagaaggaggaagaggctcggcggcacctccctccccgggagttctgctgattccatcttggggaagcagggtggaccagggcccaaatgcgccctggggagattgcgggggcgggagaggttgcaaggggcaagtggcaagagcctgttaacgtcttagggcctccaggcctttctgtgcccctagctgtgcctgtacgctttaccccacctcaggaggcttggtctccagcggttgaggctggaagcaccggggtgcggtggaaagggctctgtccaggaagaccggatccgcagagccgggagtccgggctaggaagtccctttctcggtgggagactgaggccgccttggcggggcgggacgagactcctccgaggtcgggaaagggggccccgcagcagccccttggcttcccttctcccttgcctcccctccggggctccggttcagaggcactctgggcgcctgctacagcttccaaactgcgccgcttccttcttcggcagaaaaggactttcagatgcggcggcggcggcggcggcgactcaggacagcgccccctccccctaacggccgcctctccctctccccctcgcccgccccggctcccccacctctgggaaggcgctgggggtgtggccagggaccggtataaagtccgggggagccggtcccgggcagccgctcagccccctgcccctcgccgcccgccgcctgcctgggccgggccgaggatgcggcgcagcgcctcggcggccaggcttgctcccctccggcacgcctgctaacttcccccgctacgtccccgttcgcccgccgggccgccccgtctccccgcgccctccgggtcgggtcctccaggagcgccaggcgctgccgccgtgtgccctccgccgctcgcccgcgcgcccgcgctccccgcctgcgcccagcgccccgcgcccgcgcccagtcctcgggcggtcatgctgcccctctgcctcgtggccgccctgctgctggccgccgggcccgggccgagcctgggcgacgaagccatccactgcccgccctgctccgaggagaagctggcgcgctgccgcccccccgtgggctgcgaggagctggtgcgagagccgggctgcggctgttgcgccacttgcgccctgggcttggggatgccctgcggggtgtacaccccccgttgcggctcgggcctgcgctgctacccgccccgaggggtggagaagcccctgcacacactgatgcacgggcaaggcgtgtgcatggagctggcggagatcgaggccatccaggaaagcctgcagccctctggtaaggtacccctggcctcccaattccctcctgagtgcgctcccttcccagcggcttcttccccattccagccgccctggaaggcccttaaaaatcccctatgagttgaagagaaggcaggtacgtggcagggcccgactggcatgggacaggctcatcaaggaaactgctaccgagtccctagcagcctgttgccaccaccaagggagactgtcccatcgctccatctcaaacctccaagggttgtctgtttgataagggggtcccagtgggaggcctggctgctggtgcaggagtggcagattaaggtccagttaagtcagctgtctagggccagagaactggaggatggtggtggggtgtgtgttggggaggatgagggagtggggaaagctttctgttcctgatccaggccgagggtgaaatcccagtggtctggggagccagggcctgaactttttttttacatggtccagtggtggagtgggacatacaaattagagggactttggcgttgaggggcattagacttgcccttccccaaagcccagagccaggtcaccttgttgtttgagaggcagtgggaagacaggggtccctctgccaggcctggacacctctgcctgccctggtatacaggccccctgttcttttctccaggcaggtaggatttgaggtggtagaaaagtcttggctcctagccgagagctgcaggagcctcatgtgtgtgggatagggaatagagaaggggccagggcgccaggggagagaaacagagagagagagagagagagagagaaacacacacacacacacacacacacacacacacacacacacacagagacagagagagagagagagagagagagagagagagagagagagagagagagagagactctgagaaggcccttgccctaacctcattcttacactttctttttttgtttctcagtttctccttagactctcagtctcttttccttctttctcttgctcttttgttcttcctgatttgtctctcaacctctagtttcactagtcatgctctcgagttctgttttcctcagtgtcttctgcccatcgtgcgtttctttctccaccttattctgtgtttctgtttcagttgctctgcttctctccctctctttctgttgctgtttctctgtgtctctgtcactgttggtctttccctgttactttgggaatctctctgtctgtctttctgtatctatgcctctgtttctcattccatctccgaccctgttttgctctcctgtgcctctgtctgtctctgtctcttttcctggtgcttgaagcttccattgttgcagtccggatgctgggactccagccccaagcttcctgtcctgggacccaaaccctccacttcctcaatcctctgcagcttgtcagccgaggagagcaggatgcagggaaaacaggaaggaggtggactccaggggtctgggcctcgggcctctctgcccttcctgcccctgggtagggagagatgggtcagcagaaaacattctaggagaaatgccagcctggcacccagcatatctgggaaggggggtcctgggggagaaagtcgctaatcttggggcagagatgccagtggcaatggtagaggaggggtactgagactgggagggagcaagggccgagcccttgggttcgcggggtacaacagagtcacgttccctttgaatctccatcctccaccagccagagggtatctggcaccagataaggatggctggtagcctcctcctctctcagcactttgaatgcaagacagaagagccctcaaagggctgggtaggaatacctcatcctctggttgggtaggaatactccatcctgtagtggaggaaaataagatcccctaggggtttggggagggcatggcatgagaattttgtggttgtcctctggatataatgcaaactggcctccaggaatatctaggggctgggtgtggaggttcatgcttgtaatcccagcactttgggaggattgcttgaggccaggagttcgagaccagcctgagcaatatagccagacccccgtctctacaaaaaaaaaaaaaaaaaaataggcaactgcagtggctcatgcctgtagtcccaggtatttgggagtctgagatgagaagttcaaggttacaatgagctatgatcacgtgattgcactccagcctgggcgactctatttcgtaaaaaaaaaaaaaaaaaaaagtaggccgggtgcagtggctcacacctgtaatctcagtattttgggaggctgaggagggtgaatcacctgaggtcaggagtttgagaccagcctggtcaacatggtgaaacctcgtctctactaaaaatacaaaaattagctgggcatggtggtgcgtgcctgtagtcccagctacttgggaggctgaggcaggagaatcacttgaacccgggaggtggaggttgcagtgaaccaagattgtgccactgcgctttagcctgggtgacagagcgagactctgtctaaagaaaacaaaacaaataaacaaaaaaaacaaaaaacggtgtcttggaatggggtggctttaggtcccctttggatgacacagccaaggtctgtaatgcccctccccctttcctccttgccttgtcctccagcctccagccatgcaatggatgcaggtatctggagagagacgagggaagcctggaggtacctactgagcaagctatgcccgtgccctcccacacctcctagtcatcatagaagtaatcccttgctgtgacctgggccacatggcaccatgtaaaaggcactctctagagttctgctgcagccctgcagggtctgtgggtgagataagacgaccaagcccctacccacccatctttttagccttacacagtcagtaggccactgtctgctttaggtcccaaggtttgggcccactggcccgcgaatagcttggtcgagggtacctgtctattttttctgccttttccttttggggctgagtgtcagcaggtggctgggggagggtggccacttggcatgcccccttctttggctgctatggtccagctgcctcctgtttgccccaggggcagatctcccctttccgtctccagccacccctgcctgccctcctgtcacagctttccatgtgctggccaggttgtggcttaacaccactgaggccaccagagatgaggcggggcgtgtgcatcaaaagtccacacctctgcatcctggtactgatcctagactcatggaatctgggggagtggacagcggaaagatcagcgtttggacggggagttcctaagctgggctctcagtccctttgggacagggttagggaacaggcaggctgggttaatttttagtcaatgcagcaaattctgcccccctacttcagtactgggaatccagttatgtcatgggaacaagggcattcccagaaattctgtgccttgtggggagggggagggaggagcatggccgcttcccatttttaatttagtactggcaaagctagcagtattggtgcctcgggtatcaggagtctttccacttaaagacagagtgctgcagagctaagtctctcctcctccccttccacccagtctacttcattttcctaatttttaaagtggggagggcaacaggacctgcctcacagggttggggcgtctggcatcgggtaagagctcaataaattgaagtgatgaggaagatggtgatgaagaagctgatgctgggacttagggaagcggtaggacgagggagcaaatttggggcaacattcagaggagttgagaggggtggggtggcctttggtgcattttgctgctgtcaacatgggaagaacaggccaagttgccttatctgttttttattctgaggctggcagcatgacacagctgttgggggtgataccccttgagccagacctcagagaaagggcctggtacccagcaccagcggtcttggcttctccagctagagtctaggggaagagggaaaagacctttctagcaggacaggtgggtgaccctctggatcacagctgaaacttctggtcgggatggctgggcccactcagttcatagcctaggtgtctctcgagggccaggggctggcgttggggagaaattgtgagggtaaaatcaggcaacaggaaagaggaaatcctctggctttcgccacaaactttgcagccggtggtgccaaagccgtgtggcctcttctctggcgccttcccttcctctgctgctggagcaaagaccgaggtttcccctatagtcagatgtcaactggcttagctccaagctgggcgctgtaggaggaccaagcctacttggaagtcccatctcccaaacaagctttttggaggtcagacttttcaggggaataggtctgactccactcctgctcagaggggaacccacaggcattggaatttctccagagggcactaccaggatgagtagcaccaggtggctggaactcttgtgtgagcagggaaatagcaagtatttagccagttttggagatgagaaggttaacgttatcaagagactcaatgctataacccttacccccacaaaaacctggtgcttaggggtggatcctggggtggctcttcagtctgccagttaagcagggttgggcaaggaaaagttacagattacatggaaagtcaacaaaccacggtgcagagaagctgttgaagtcagcgtgccctgccctggctctgtgtctctgaccagggcagggtcagagtgcccaagtgcatgtgggtaaggcacatgtggatgaatgtgtgtctggacacgtgattgtttgtgtacacttgcagttcttgagcctgagcctgtctgtgtgagtaggcaaatacggatttaccctgtgtccccatgagactaaggagggagctactctccctatctggtgggtgctactccgtgtagacatgaactggggataagtaggatggctagtggggaacctaacaagggagaagccaggcagtttgctggcttagcttttcgtaggtaaccctctgatgtgacatggggccataccaacccaagagcataagccatgcctctggactcaccctgtgccccatgcagccctaggcttcagtgagcatacctaatcctccttaatggtaaacatcccaaatatccattaataatcctctgagggttagttatttgtgaactttgactcgtaaaagctcagcactgtggctcacgcctgtaatcctagcactttgggaagtctaggcaggaggatcacttgaggccaggagtttgagaccagcctgggaaacacagtgacaccctgtctcttaaaaaaaaaagaaaaggccgggcgcaatggctcatgcctgtaatcccagcactttgagaggccgaggcaggtggatcacgaggtcaggagatcgagaccatcctggctaacacggtgaaacttcatctctactaaaaatacaaaaaaattagctgggcatggtagcgggcgcctgtagtcccagctacttgggaggctgaggcaggagaatggcgtgaacctgggaggtggagcttgcattgagccgagatcgcgccactgcattccagcctgggcgacagagcgagactccgtctcaaaaaaaaaaaaaaggagagagagagagaaaaagaaactcagcatggaaagcatagttgtggtcatgcttctattccatatctcttgagatttttgaggctgctaccaccctaattctccacacttccagggtgggagctcactacctcctgaaaactcttcctcactccttgaactcctgaaaaaccttcctcactccttgaaccaaagaatattctacccatttactgagaggaatgaatcattgtacaaaatagtgcttgcttttttaaaattttgagacagggtctcacttgttgcacaggctagagtgcagtggtgtgatcactgctcactgcagcctcgacctcctgggttcaggtgatcctcccacctcagcctcccaagtaggtgggactacacctgtgcatcaccacaccaggctaattttttgtagagatagggtttcactatgtttcctaggctggtcttgaactcctgggttcaagcgatccacctatttcggccttccaaagtgttgggattacaggcgtgagccaccccagctggcccctagtactttcttttatggtcattaaaagaaagcaaactcaggaaaaacaaaggctttccaggttggaagggtgccccctggtgttagtgtcctgggctgtggcaaacaagtccaggtgatctccagccctacttaagtaacagggtggggcctttgtccacatctcagctcagcctctgtccttctgacatttggttctaattctttaattcttgaattttttttttgtttttttgtttttgtttttgttttaagagacagggtcttgctctgttacccaggctggagtgcagtggcacaatcatagctcactgtagccttgatgtactggggtcaagcgatcctcctacctcagtcttctaagttaggaccacaggcaggtctgactaatttttttttttttggtagagacagggtcttgctatgttgcccaggctagtcttgaactcctggcctcaagtgatcctcccacctcggcctctcaaagcactgggattacaggcgtgagcacccagcctggttctaattctttgaggtcttccatttcctttttctctccactccccagttccagcttacacccctgaaacacggtgactccatcctcaagccttatggctttgtgcaaggtgggggtgtggagggaggtgatcactggggcagcttaggtttctttggctggaggaattccttgggagggtctcaaaggaagggcctggatcccagatctttctctggttcctaaccgagggctcaggatccatctccttatggtccccttggcacagtcctcgtcttctgaagtttatgtttcttcttttgctgcctaccttggccagggggtcttgctatagtgtcttctctttggttgactcttaggaacttgatgtaggactggagtcccctctggactgtccttcttgggattttaaatgtgcagaaggatggattatatctgtctactctatttatttcttcccttttattcctcttttctaagccagctctccaccgtaacaaaatcttcttccatccttggtgaattttattaataacctttggtgtggaaggttattgataaagactttctggttagattcctccttgcctggtttgcctttatccacatatttctccccacaccccccaaaccaggagaatgaaaagagaaccaacccccccagctttggctaggcagaaaaataccatttgacccagaggcagctctgggatcgctgccacgcatggaggaacctgctaactcctcaggaaaaaaaaaaccctgacgcaaaccagatgtaacctcctgtccggctgccaacatctggaatgctggcaggggctttgcactcaggccggcagcgagctgccaagcctgagcatttcagaggtggctctgatctgcagagaggtcttccaacctctttctccagctcagccctgtattctggttttgactgcttggagggaggagcagtggttacagttctgggactcaagcatggggtttttcttttttaaaaaaatgtattttattttattttatttttttagagacagggtcttgctctgtcacccaggctggagtgcagtggtgtgatcatagctcactgttaacctcgaattcctgggttcaagtgatgctcccgcctcagcctcctgagtagctaggactacaggcacatgccaccatacccggttaatttttaaattttttgtgaagatggggtcttgccatgttgcctaggctggtctcgaactcctggccttaagtaatcttccctcctcagcctcccaaagtgttgggattacaggcatgagccacaatgccccatttggatggagtttttcttgagctcagatagagccttcaggagatcccacagaggggttgaaggtccagcctcatcactcccgtctccagatccctggtgccctggttctgggcaacccctatggactttggatggagtctgaagtctaagaatgggaaacttcgaggtgggggactgaaggaatgtgtgaggctgttcttgtggtcctggggccacacaggttgtgttacacacacactcacacacacactcactcttcctcatgcaggcggatacactaactcccacttctctcccactcagccaatggggagagccttttgggctagagttctcattgctcatggaaactctgattcaggccatttggaagagggcgagcagagtccacagccctggggatcccctggctggctcagccagacaccgaaaaaatcaggagaggcaacagggagaacgatcagatggagaggggaatggtgggagctgaatggaaaggggacaggatccagcagggggtccccctgcctgcctcagacctccctgcagggcccaggggaccctcctgccatctgggcagctgcagctggtgactcatctgagcgctggcctgagtggggtgagggacaagtcaaggacttcaagaggaatattctcctgagagatccaggggagaggggaggaggtagggggctgctcttgtttcttcccgctccccaggccccctgctcttctccagcgccaagccgaagaatccccaggaaggagaacgtgggtgggaggctgggttggtgtgacgctctgacctcttccggtgctgacctctccttatcgctacctgaatacagacaaggacgagggtgaccaccccaacaacagcttcagcccctgtagcgcccatgaccgcaggtgcctgcagaagcacttcgccaaaattcgagaccggagcaccagtgggggcaagatgaaggtcaatggggcgccccgggaggatgcccggcctgtggtaaggacctccgatgcacaaatgtgcatgtgcatagacacacacacacacatgccccctgccccccacatgcacgcacccacacacaccatcaccaccagatctggggcgtgttcattcagcacacattctagggtgactactgtgtgcaaggtgcaactagtgtgagtcatcaggacccagagaaagcactcattcccttccttgggattcctttcctgcccatcagttatatacatcggggcagcttaagtgattattaaatactgaaaaacttctataccaattggtaaaaagcagttacccaaagcgccctggggtttcttggccttttttggattccccaccccagaccttctcagtaaccaaagggtaatgctggccatagcagggggcctgggaccctgctccagggtctggctaatttcccttctgaaggtcttacaagttgtcagttggaagttttatctgtcccttctgcatagaaatcaccccctccctggctttctgcataggttcccacagcccctttccccacagtgtcccctcacttcccacccctcctttgaagaagctctttggctcgagaccctttcctccacgtctctaccctcccagtgtgtcctccagacccaggcctctctcttcacctcactgggtcctgcccagcccctggggctcaggcctcctttcggggccttcagttctcacttagctctgaccccaggcctgggcctcctgcctctcttccttctgctgagcaattttgtcttcccctcctccagccccagggctcctgccagagcgagctgcaccgggcgctggagcggctggccgcttcacagagccgcacccacgaggacctctacatcatccccatccccaactgcgaccgcaacggcaacttccaccccaagcaggtgggtctctgtctcccgctggcttggccctggactcagctctggggcatttccggcctctccgcaggatggtcctggatggagatctcaggaaggggaaactcctcaaccccaacccaaccccttggagcctccctaaacctacctcagcgtcagaacctcactcattttggagatgaggagactgtgatccagagaggagtaaaagcgccgggctagtccagagtcatagaacaagttaacagcagatcttgcctccctatccagggcaatttccctcacccctggatttcaccatctgtggtgcagacctagcaaccctgacaacctctggctcccaacactctctcattcactctactctattcgtatgagtaattcctcctgtcactgagtgaggtttcttctgggaatggagggccaaagtcatgaggagtcagggaggaaactcagcctacccctccctgcaaggcgagtagcaaaaccacctggggtacagcaagagtgaaggtaaaaccagattggacggttggagacaggcactttgggtagaagcagaggaaggagtggggcaggagagaagacacaaaggcagcaacttccctattccttcctgcccttggaagctggggtcctctgacaagcctccaggaggctgggatggtcagcagggttggcctcttccagtctatctctggcccatcagaatgggtggcctgtctgggcagggctctggtgtgcctcctgctgggtgttgcctggggaaccctagcctggagctctttgtcgacgtagacagacccatttccctgctccatgagctatagacaaatccacaatttgagctgccactctgccagcagaagtctagatagaaggacaaaggttgccctgagtctgtgcatcccaggatggcatgaaaagggtatgagtgaagggacagagagggcaccccaaaaccaatgcccagcctatttctaacctttatcctaacacgaattttatccttgtcccaatttaaaaaactttttctcttaatttaaaaaaaacaattaatagctttattttttagagtagttttaggtttacagaaaacttgagcaagagtacagggtttcaatgtactgtcatccaccccagtttcctcattattaacatcttacatttgttgcaattgatgaacgaatattagtatattattattaattagtggtttatattagggttcactttttgtgttgcaaaattctatgcattttcttctcctgattttttttttaaaggcaggatctcagtctcccaggctggagtgcagtgatgcgatcacagctccctgcaacctccacatcctgggctcatgtgatcctcctacctcagtctcctgagtagctgggaccacaggcacacaactatgtcaggctaattttttttttttttgagacagagtttgtctcttgttgccgaggctggagtgcaatggtgggatctcggctcactgcaacctccatctcccgggttcaagcgattctcctgccttagctcccgagtagctgggattacagttgcctgccaccacacccggctaattttttgtatttttaggagagatggggttttgccatgttggccaggctggtctcgaactccggacctaaggtgatccacccacctcggcctcccaaagtgctgggattacaggcttgagccactagcttcttcctctgatttttatcccattgaaagttctgacacttgaactttatccccagaccagttctgatccttaagctatccttcactccaagattaattctcacactgaaatatacatttgcgccccctgaaccttctactatctaattttgacccaaaatttagcttaactttagttattctgaccttgacctctgtctttatcccaattgtgtttttacctgggctttaaccctcacccaactcatccagctcaacttttagtcatatttcctcattcaactgcaactcttaccctggtcctaccttaatcccagcttggatccacctcataactataatcccattcttaaagtcccaacccaatcagaatatgtacccaaaacatctccaacctgaacccagcctttcaaatccagctgtgcctttaaacccgagggctttcttaaggtcctgccttccagaactctctggacctttccttcttgaccatgttctccctgctccagtgagctcagaagacccatgctcaaaaaagagtcaccaccctcagaggccatcttgaagcagcgaccgtctgacttgggggctgggctgggctgggattggggtgggtcacttggggtctcttttcctgcgtcggaactgacccctcatgtccttctcttggcagtgtcacccagctctggatgggcagcgtggcaagtgctggtgtgtggaccggaagacgggggtgaagcttccggggggcctggagccaaagggggagctggactgccaccagctggctgacagctttcgagagtgaggcctgccagcaggccagggactcagcgtcccctgctactcctgtgctctggaggctgcagagctgacccagagtggagtctgagtctgagtcctgtctctgcctgcggcccagaagtttccctcaaatgcgcgtgtgcacgtgtgcgtgtgcgtgcgtgtgtgtgtgtttgtgagcatgggtgtgcccttggggtaagccagagcctggggtgttctctttggtgttacacagcccaagaggactgagactggcacttagcccaagaggtctgagccctggtgtgtttccagatcgatcctggattcactcactcactcattccttcactcatccagccacctaaaaacatttactgaccatgtactacgtgccagctctagttttcagccttgggaggttttattctgacttcctctgattttggcatgtggagacactcctataaggagagttcaagcctgtgggagtagaaaaatctcattcccagagtcagaggagaagagacatgtaccttgaccatcgtccttcctctcaagctagccagagggtgggagcctaaggaagcgtggggtagcagatggagtaatggtcacgaggtccagacccactcccaaagctcagacttgccaggctccctttctcttcttccccaggtccttcctttaggtctggttgttgcaccatctgcttggttggctggcagctgagagccctgctgtgggagagcgaagggggtcaaaggaagacttgaagcacagagggctagggaggtggggtacatttctctgagcagtcagggtgggaagaaagaatgcaagagtggactgaatgtgcctaatggagaagacccacgtgctaggggatgaggggcttcctgggtcctgttccctaccccatttgtggtcacagccatgaagtcaccgggatgaacctatccttccagtggctcgctccctgtagctctgcctccctctccatatctccttcccctacacctccctccccacacctccctactcccctgggcatcttctggcttgactggatggaaggagacttaggaacctaccagttggccatgatgtcttttcttctttttcttttttttaacaaaacagaacaaaaccaaaaaatgtccagatgattgtgtttggttgatttattctcagttagacacagggatgcaccaggggtggagagacggggacagattttgggaggtgagtattgtgtggtccccagacctgtctgtatggtaagggactgcagaaggacggccaatccaccttcctcttccctgcaacggaagtttcctagggaactccttggcttcaaagtctgcgctgtctttacttagactcctggtgggcaaacaatggctcctgaaaggggggcatgaccaaggacagccctgtgggggcagagctgtctctgggatcagctggcatgtggggctggggcatttcctagggcatcgggcggactgggcttgcatctggatttgatttattaatttgttggggaggggcagggacactgccctgcatttgaggaaagggggtagatgcttcagcacattccacagctctgactgccgagatctctgactcgggcattgtgctgagattggattctgaggttgggaggggttgactttgctgtagactcagtgccagccacagcttcagagattgtgctcacatggtatgcctggactcttggccatcctccaaatgcccctcccctcccacacctctgtgccttgtgtgtgtgtgtgcacgcatgtgtgtggcagggggtggagggtccgggagcagaagctgatctctcggtgggggcctttttccaggaggttgcaggcagtctggagacgctgcattgagcctgccgcccgctgcgcgggctccctcctatctagctgtgtcctggattctcagccccctccccagctccagaggcgcttccaggcttctgatttcactgggccccaactttgttggcacctgtcccgtctgcatcttgaggctgggtctgcagttctgtctctctagctctgccccagcagcaaagtcctgcagccatctggtctccctgaggcaccacggcggctgccagcagcaggagataaagaacaaagtggtgttgagggttgcttcctcagccccagccactcttcacagagtcccctccttctggagcccaggccaaggcctgtggggatgggaggtggtgcacgctgaagattaagttttaggtttcaagtttagggaaagtatctctttccctaaggcatctttttcaacccccttgtctctagtccccttcccgatgctctaggcttgcacccttggcagtggtggtaggaggtcctttttctttcatgggcctcccaaaaaagccaaattggcttggaagtagctgtgtgcatggcctgggtgtaacttcgtgacatacgtgcatttgtggagtatgtgtgtgtgcatgcatgtgagtatgacgcagtgacacctgaaacgtgagtgtatgggctttttgggggtgtgcatgcctgtttgatgtgtgaagggaaggtgtgccatttgtgtggtgtgtatatgtggtgtgtgcatttgtgtggtgtgcatttgtgtggtgtgtatatgtggcgtgtgcatttgtgtggtgtgtatatgtggcgtgtgcatttgtgtggtgtgcatttgtgtggtgtgtatatgtggcatgtgaacacgtgtgcgatgtgaggagagagggagtgagacattcacggagcacgcctgtctctcctggctgtggatgactggactctcgctcattaggtgatcccacctcagggtttgtggggagatgtctgacactagagaatgaacatgtgctttggggagaggactttcacatcccacagaaacactgccctgtccaggcttcatgcccacaggatcctggagccaggtcctaagtaccaaaaagcaaataaaagcagcttcttgtttgcagctaggccctcccacccttgaaacggtgggaatacccaaatggtctctctagttgccacaggggtgtcagcacctctgggagatgtgggagggaggtactggtggcaccactaaacctggatggacttgagaactgaagtccttgagtgctctgtcctgcctcctggagacatgtcattccctcccactgacttggagcaggggatgggacatcccgcctgccaacaacccctagctgatctacatcaagcatttggtttccatttcccagctcactaatagagatcaagccctgatgttggctgggggttgggggctgggttttccactggcaagaaggtggggtgggagtagggaggaaaaatggagacttgaactgattccagccttggattcaggttggggaatctctggagagctggccaagcctctgggccctgcttgctcttcaggccctgaagttccagccactgccatctcccacctctttccaggaaaaggctggttgtcctaaccccgctgtaccctgagccacattctgccaccaagctgctccaggaatgttacgaggcatgcaggatttgggatgcctgctcggtcctctttcccagtgtggggggctgttatgtggctgtgtggtaaatggcctgaagtgttacctgacagagattccccctgtattccaggcctctctgacctcgaaagagaaagtcaaggtgatgtggtggaatggagctgggaggcaggctggcctctgggatgttgggtcaggaccgtggggcagacttctgggcacacccatggaggagcagacactgctgcagccaaccaagggtctaattagatcctcacttccagagtgacctgtcccctcttgtatctgaagctccagggttggggagggtggggtcagggagtgtaagtggagggagtagctgcagataattagaaacatgctctaccgagtgagcaggcgccaccaggaccaccccacccctcacccccaccccccacctcttttccttaggtccccagcccccttcccttctacctggacaattccagccaaactgggggaggcgctggtggagcctgggagcagcaactcggtgggattggcttcctaggcccttacacagtctctaaagtgcaaacaacatatttttgccatgctatagtatttaattacacataaaaacagagccattaagctgaaattaaacccttgttggagtcacttaattcagggcatgacaaattgctttcagtggaggcggcagtgcagtcccccagggaaagatggagattagtggcttccatggctggctgggtcccctccttctcttggtccccttgccagctctaaattctgaaattggggtcagaaccctttttctgaagaccacccaagccaaggggaagcctctaggtttgttcaggaggataggaatagagggttggggaatcacagaatcactgtccaacccagttttagacaacccagtatatttattgatggggaagtcaaggcccagacaccaaggttgtccagagccaggattaaaactctggcactaagccataactagagaggctgctttttttcctcaggcttgtgtcctttgaccttgggcctgaagacagaggttgaggttggggccgcatggataaggggtgggaaccaaggcagaccctggatggggagggcagacttctccagaactagattcccacctggtcaaagtctggagacagtggggaagggaaaatgaccctggggtttgggctgtcgaggcggccatcacttctggtgggcggcctggagcccagactctggcatcaggcagatctggctgctgaccagctgagtgaggttgggcaggtaagaccttttgctcccgtgagcctccgttttcccatctgtcaaatgggagtagtaattcctatctagagttgtggagaccattatatgggcatgatgcatgaacaggcttggggctgagctcactaagttctgttagacttccttctccggacttcagtttcctcatttataacaagatccagctgggatctgatggcttttggaagcttcgcttgctctttttatgctggcagcccttcgtcctccctctagcccctttctttccttccctttccttctttcttctgtgggttgaatgtctaactagggacagaagtctgggtctgtggtcagacgattgggtaggaaagggaggtctgcaccccctaaggtttccctgccccatgtggccctcctgtggctgtgtgtgaggcccatctggagggtgaaaggagaccaaatgggacaggggccgcgctcggggaggggcttgggggtcctgcagcaagggcgggctgctcgttgtctgtggcctccctccccatgtgtcctctatgatctgggaacctgttctcctgattggaaacagatgggtctgctgcggctggaggcctaagctttctactcactccatgtcctcccccaggagaggaggcgggggtagaccaagggcaagtggtggaggtgtgtgtggggtccctcttcgcaggggctgcgggggagagcccttcttcccttctccgtctctcttgtggcctggaaacctttctattagcctacagagggtggctggctgtggacagcctctcactgaggcatgggtgggcagtttgctaccttacctgatgccatcctctaggagcagtacccgctgccctcacctccctaccctgccccccattctcagagctcagctcagctgcagattgtcaagtgggggctgaccatgcctgacccctggtctcctggagtagccttaaggtcatttccttcgcctcggcttccttggttttggcagacagagaggttcctgcactggggcttgagtggaagggctggggctgggctggggcccagggttcccatcatatcaggcctggcagccacctggctgcaaatggctccccagcacaaatgttttgcagctgtccctcggtcggcttgccctggagagccttgagacagaggtggggagtccaggagacagagggcacaagtagagagccagggtgggtgggggacaagcccagagggccgcccagcagacccaggctgctgggagagtgacactgatgaggaatctccaggttcttgaaacagcctccgcaacttgcaagggttgggataggggcttcccgaggcaggatgacggggagcaggggctgcctggcagggccaaagctcagggtctctgcttccctcctgggtcctggtctcttgagtagaaccagaaacttctaagttggagcagtggggaggggagctcagcctccaccccacccaggggaaattagaccagacttcccaggaaataatttcaattttccagcatcatggaagcctagtcggacaatagaggattttttccccccaaaaaatttttaaaaaagcacaaaaaaactccaattgcctttggctgagctgttttccaacttcatttctcagccacagttcaaaacttctcattcaaagtgacatgtgactgctctgtgaccctggtccgctcggccaccggccctgtgaggggtcaggccaggccagcacagaactcgagctcccagaatctgtgaccacccccactcccaaaagccttccgaggtctgctctggagacaaggcccgcaggactgtctctgggcagccccagcgcctcacaatgagggaggggctgcggtggaaacaaacctgcctctgaaagagaggagagtttaggggcgggtgattcctacagcccaggcccaggcccacaggggtttatgttacaatataaactggggctttaacaactttgagacagtttcttatttttagggttggggcggggagtggaggttgtcttaagaatgcaaatggggcagggcacagtggctcacgcctgcaatcccagcactttgggaggccgaggtgggtggatcatgaagtcaggagatcaagaccatcccggccaacatggtgaaaccccgtctctactaaaaatacaaaaattagctgggtgtggctgtgcgtgcctgtattcccagctactcgggaggctgaggcaggagaatcgcttgaacctggaaggtggaggctgcagggagccgacattgtgccactgcactccagcctgggtgacagagcgagactccgtccccaaaaaaaaaaaaaaaaaaaaagactgcaaatgggccttgtaaacccctccacggggatgttcttagggctctaatgagtggggaaggccctgcaggccagggaagggccagcctccagttgtactgtctgcagtcagcagccctgggacactggcagaggacaggagggtcggtgcaatcctaagtggcaggtgggcagggagggggtaaaagggggacgagcagaggctgccaggaggcagatctcaaggttctggggtgggaggtaggagagggggcagaccacacaggaggctttggggagagcagggcagggtcacggctggagaggagagagcagggtgtgtgtgtgcatgtgtgtgtgtgtgtgtgtgcgcatgtgtgcacatgttcaggggaagggaagagatggctctatcttgtggctgagaaaggtcatccccaagaagagcagggttgggaccagcatgttcctctctggcaggtccataatgaagatgggaaaccgaggcctcgatgggcctgaactggcttgtcggaaggtgtaaatgaactggtggtggaagcagattagaactcagggcagtattctttcccccagtgtctcctggtgggataaaaaggggaacctaaataggaaggggcacttcgggcaccagagaggtgaagctaggccaggggctttcatttgggaggaaggaaggaagggggtgcagtttctgggcagaagagccatgatcctacatgagggggacggaagtgtgtgaggtcctgctggggaccacacacttatgtggtggccttatgtacctgagctcaggggcagatgaaggcagtggagaggcatctggttaggaccctgtgtaacaccctccagaggcctcctgttgaataccttccttggcctgtagagctctctccgagtttctccagcccctttagtgtgatgctgccaacctcagggcctttgcacgtgctgttccctctgccgaatcactctcacccctgctcttcacaaggctggctcccctacctccagccttcagccaaatgtcacctcccgtgagagtccttccctgaccatcctaggtaaagaatctccctcaaccttacttttctaccatcttgtttatttcctgcataatgtttttcacaattgtttcttgggttcccctgttttgctaaaacacatgctggtcttatttaattacacttgaatctccagagccgggtgcacagtaggagctcaacgaatgcttattgaatgaataaatgaataaaaaaggaaacaggaagcagtcctgggtggctgcagggctgaaggcttcttataaggggaccagggtcctctgcccagtcctgcctttctcttcactcttcctaccctagccccgtggggtccctgaggacagcccaggtggcagaagccttcctgggacaggagagctcagtgcaacaagaaagctggcacttgaggccaagcaaggtggctcatgcctgtaatcccagcactttgggaggccgaggtgagcgaatcacctgaggtcgggagttcgagaccagcctgaccaacatggagaaaccctgtctctactaaaaatacaaaattagctgggcgtggtggcgtatgcctgtaatctcagctactcaggaggctgaggcaggagaattgcttgaacctgggaggtggaggttgcggtgagccgagatcgcgccattgcactccagcctgggcaacaagagcaaaactctgtctcaaagaaaaaaaaaaaaaaaaagctggcacttggataactttcttttttttgttgttgtttttgttttgagacagggttttactctgtcgcccaggctagagtgcagtggtgtgattatggctcactgcagcctcaacctctgggatcaagagatcctcccacctcttgaatagctgggaccacaggtgtacaccaccacacccagctaatttctgtattttttttgtagagacagggcttcgacatgttgcccaggctggtctcaaactcctgggctcaagccatcctcctgcctcggcatcccaaagttttgggataacaggcatgagccaccccagccagctagccgtctttctatctatgcctctgtctttctgtgggttcctttgcctctggtcctggttctcttatttggttcttatctttccattttctgtgtcttgctgtcctgtgctcctgtcccttttctccctctccatctccctctcccactacctctttttttgtttgcttgtttgtttgagatggagtctcactctgtcacccaggctggagtacagtggcgtgatctcagctcactgcatcctcctcctcccttgttcaagtgattctcctgcctcagcctcctgagtagctgagattacaggcgcacgccaccacacctggttaatttttgtatttttagtagagactgagtttcaccatgttgcccaggctggtctcgatttcctgacctcaggtgatccacccacctcagcctcccgaagagctgggattacaggcatgagccaccacacctggcctccccctacctcttaaatctgccccatcactgggttttcctgcgtgctgctccccgacactactccgtggtctgcctggaaccgaggcatgccctctcctgccaccacaaaagaccctccgcagtgcgagataggctctgtcataatgccaaggctgcctggcttttgggaggggaggtggatggaggaagtgagggtgaggcaccagggatctccccacacacctgcccccaaacacgttgtctgagggctcaggcggcccccacccttcaggcagggcaaagtgggtggttctctgttcatcttcctcctctcctccaccatgcattggtttccatcttggcaacttgggagaatgattggctgccctgtctgggaggatggtcctcatgagggtatctcagagagtcctgcctggctgatgggaggggtgggacggggccctgactcagaactcaggttttcatccctatcctaagctggatcctcctggccctccgcatttcaggagagggttccatcatcattcctgtaggctggaaccctgggagtccttctagataaccccctcccctacttctcactcctgttccatcttgaagtcctgtggattttaactcgcagtacctctccactctatccctgctgtcctgcctccatccaggtcctagacgtagcctccaccattgcttcccttgcttattccacagccattctcagcttattaatcgccaggttttttttttttttgacagagtctcgctctgttgcctaggctggagtgcagtggtgcaatttggctcactgcaacctccacttcctgggttcaggcaattctcctgcctcaacctcccaagtagctgggattacaggcgtatgccaccacacccggctaatttttatatttttactagagatggggtttcaccatattggccaggctggtcttgaacacctgacctcatgtgatccacccatcttggcctcccaaagtgctgaaattacaggcatgagccaccgcacctggcccccaatcagttcttcctacaataccaggaaattgagtcctgtcagcctcttgcttccctggcctctcagggaagggtcaagaccaaagcccccaacatgagctggaggtcctgcttggcctagcccctgctgacctcaccaggccccctgcccctcacacccccttgctctctggggccgctagccagactggctgtattgcattcccttccaccacagggtctttgcacatgctggtccctctgctttcaatgctcccaatgccccctcctccacaccccctgacaatggatttttcttcagctctcatctcagccatcatcacctcctcagggaagccctccctgacttccctgagcaggtcaattctcctgagtattcatttcagagcaccttgagcatcttctcaatggaagaatatttagttaggcattcacagtgcagttactctgtatctttgtccctctttttctttttctttctttattttttattttatttatttattttttgagatggagtcttgctctgtcacccaggctggagtgcagtggtgcaatcttggctcattgcaagctctgcctcccaggttcacgccattctcctgcctcagcctcctgagtagctgggactacaggcgccttccaccatgcccagctatttttttgtattttcagtagagacggggtttcaccgtgttagccaggatggtctcgatctcctgacctcgtgatacacccgccttggcctcccaaagtgctgggattacaggtgtgagccactgcgcctggccttctttttatttttttgagagggagccttgctgtgttgcccaggctggagtgcagtggcgcaatcttggctcactgcaacctccacctcccgggttcaagagattctcctgcctcagcctcctgagtagctgggattacaggcgcccgccaccacacccggctaatttttgtatttttagtagaggtggggtttcaccatgttggtcaggctggttttgaactcctgacctcatgatctgcccgcttcggcctcccaaagtgctgggattacaggcatgagccaccgccggctatccttcatttttataagctccatgaggtcaggaacctcattcatcagtgtagttccaggctacatgtttagaaaataaaaaacacaggccatctagttctgtgtgaatttcagataaagaacaaataattttttagcataagtgtgtcccaaccccatctctaagggctaagcacagtgccagataaacaggaggcctgaggcagatactgaatgattactgaataaatgtagcaaggggctttctgcctgtctcttcaatgcctactgcccatagatgcttttctcctgtgctctgtacccttggcacctagtagccctatttcttcattttttttttttttgagatggagtctccgtcactttgtcacaagctgaagcgcagtggtgtgacctcagctcactgcaaccttcgcctcccgggttcgagggattctcccgcctcagtctcccgagtagctgggattacagacatgtgctaccatgtctggctaatttttgtacttttttgtggagatggggtttcaccacgttggccaggctggtctcgaactcctgacctcaaatgatccgcctgcctcggccttccaaagagctgggattataagtgtgagccactgggcctgacttatttctccattttgtaagagggaatgtgtctctgtagattgcctcgatttgggtctcctgtcttctggccctgttctctctctgggtttccttcttttcggatggccctcctcctggtctgtttctccatgccctcttttatttttttttattttttatttttttctgtttctccatttctctttttttcctgtcttttattttcttgaaaaggagtttctctctgttgtccaggctggagggcagtgacgtgatcactgcaatctctgcctccctgattcaacaattctcctgcctcagcctcccgagtagctaggattacaggtgtgcaccaccacgccaggctaatttttgtatttttgtagagatggggtttcaccatgttggccaggctggtctcgaatttctgacctcaggtgatccatccccctcagcctcccaacgtgctgggattacaggtgtgagccaccgtgcctggccctgactttttatttttgtctccctctctctttgcttgtcttccctcccttctccccatcccatctactcacaagtagctgggggtagagtggtttcccgggggtctctgtctttcccagccaggatccttgggtctcattatggggcgtccacgaaggagacttgctctggcaggagtgggtttcaagcactgcaggaggaggtaaatttgcttggagcatttggtttggatccttggtcctgatggaagattctgggtgggggattacaggggagatgtgctggcttctaggcagaaagagagaggcatgactttttcaatttcctgagtagcctggggctagggatcagggtgggagggggaacctaacccccaatggaagaagaggcatttggcagagacaccaggagggacagacaaccctgtcctggtgtgcctgaaggcagggtattggatttgatgaccttgggctcaataaactccaaatgtctgctttcatctccatcaccatcgtcatcattatcatcagcagccatgggatcagattgcctgggttcagatcccactctgccacttatggttgaaccttgggaaatttacctaatttttgaatccacagtttcatgtccatcaaatgaggataaataatagtacttaggtagtgttgttgtcaagattaaatgagctaacatatggcaaagcttctaacagatactacagacctaccatgtgccaggcactgttctagacgctggggattcagtggtgaactagacgagtctctttcttcatggagccctcattcccgtggcccagcactcagcacacattgagtgctcagtgagagagctgcagatatgctgcccttcccataaggagcatttatacagcaccccagagactctgaagtgcattcatgactggtgcatttataaggcttcccacaaacttcattctgtgaggtgggtattacagttgaggaaactgaggctcaatgcccagagaagtgacttgccccaaactgtgcagctaaccagtggcagaagggacctgccaccagatctgcctgacacccaggtttccatttctttttttttttttcttttttaagacagagtctcactctgttgcccaggctggagtagagtggcatgatctcggcttattgcagcctctgccttctgggttcaagcaattctcctgcctcagcctcccgaatagctgaggcatgcaccaccgcccctggataatttttgtatttttggtagagatggggtttttccttgtttcccaggctggtctcgaactcctgacttcaagtgatctgcccgcctcagcctcccaaagtgctgggattacaggcatgagccaccacacctggctggcttccagttcctgatgcagaagaagcaagtgtgtgtgtgtgtgtgtgtgcgcgcgcacgcatgtgtgtgtgtgcatgcgtgtgtatgtgtgtgcatgcatagatgggagcggagtgaactaaggatatgtccttgtcagtgttcacagggtgtcaagtctgaattcttggaggggagaacattgcttcctggggcacacgtaggcccctcccccagctcctggccaaccctgcctgcctggctctgcgtagttcactgggagtgcagcgcatatttgttgaatgcgtgaatgaatgagtgtgtgttgcttgccctcctaccccctcctcattcttcctctctggttccctccttcctggcttgtctgcctgacccccaggcctgctccagccaagctctacttgcctttcttggctagtccagatggggagaggagaacactgaaaagccttccaggaaacacttacaaaagaagcccctggctggccctgggagcctgggaaatcgagggtctcctttcctggggctgagggctccagcctggccaggactgcagcttggtggggatggggaacatgaccgggcaggactctgcctggatgggtgctgtggattgagctgtgtcccgtcaaactcgcatgctgaagctctcactcccaatgtgactatatttggagataaggcttttctgaggtaattaaggttcagtgaggccacaagggtgagattctaatcagataggatggtggctttattttattgtattttatttatttatgtttttgagacggagtctctctctgtcgcctaggctggagtgcatgatccacccgcctcagcctcccaaagtgctgggattacaggcatgagccaccgtgcccggcaggatggtggctttataagaaagggaagagagggagagggatctctttctccatgcacacacactgaagaaagaccatgtgagcacacagggagaaggcagccatctgcaaaccaggaagagagtccttatccaaacctggccatcatggcaccctgatcctggactttcagcccccagaactgtgagaaaataaatttctgttgtgtaagctgcccagtctatggtattttgttatggcagcccgagaagatgaataatacaagggggaatgcaggcccctggtcctgttctgtctcacatagtcctcccaagctcagagggaaccagggacccaggcctggatcgagcagactcctgcaccagcctgtctcagggtgagagctcctcttcttaggctctcatcccttccctggtctgaactccaggttctcatcccagcacccttctccccagcctgggcctcagatgccatctcctgcctccactgccatatttctaaagcagaaatctggtcaattactcctcagctgacatgtctccctgatgcagggcaggcgagccccaaattggggcttagcctgggagggttcttggcttcattcagggaataattcaagggcaagcggtgatagaagaaagcagctttctagaggtggcagtgtcacagccctgtgactgctcctgcagagcagggctaccccagtgtgctgagagctgcagctcagtagcttccacactcatatttgcacccacttttaaacacatgcaaattaaggggcagattatgcagagatttgtagaaaaagggtgataacttctgggtcattaggttgttgctgccatggaaaggggtggtaatttctgggtgttgccacggcaatggtaaactgacatgtcacactggtgggtgtgtcttatggaaagctcctcccaccccatccctgttttagctagtcctcagtttggacctgtgtccaagccctgcctctggagtgcagtcccgcttcctatctcatcctcattacctatgggataaagcccaagcagggtgccatgtatgaccatgcactgcatagcccacaaaatcatacacagcaggcctgagtcccatctccttcattcagcaagtattcaatctccagacattctcagctggcacccaagggtcctgagggtcctgttgctgtctttttcttctgctttctctctcacctactcccttaggtaccatgtacttgagccacaccaaacttggtacatcttttcatacctgtgtgcttcacacacgaatgtctccatctgctttctgtgaatgctggggcaataggatgggcatggacttgaaatcctgtttctctgccatttacagttaggtgaatgtgggcaagttaaccctctgagccccagttttctaatctgtaaaatgggattaggcttatataatgtgcctcagattgtatgtagcacatgagagcccctccccactcctaaaagttggtttctaactctctttgcatgccgaactcctattcatccttgaagacccaactcaaatgttaccttcttggtaacattgccctccttcccttcaagtgggtaaagtttatctttctcagtttctactctttccaccagccctgcatagcacttataaacctctgttggaaacactgtcatatttttctgttttcctggttcacatgaataaagcacacagccagaaaacatttgttgcatgaattaaggcactggcccctgggttgaaagcctttaaccctacccctgccctgggtctaagaccttgccctgggtctaagccctggcacaagaatgcaggatcagaggccagagataaaacagagcagtgagcagcctccgccctcggtggggcacgggcatggggcggtggctggtcagatggtcggggtaagggcacttcagcctcctggagaggtctctgtagcctgagagcaggcagggtttagagggtgtgggaacctgagtttttgtttgtttgtttgttttagagatagcatgttgctctgtcaaccaggctggagtgcagtggcacgatcacagctcactgcaacttccgcctcccagtttcaagggattctcatgcctcagtctcccgagtacctgggactacaggtgcgctaccttgcccggctaatttttgtattttttgtagagatggggtttcaccatgttggccaggcgggtctcaaactggaacctgagttttgagaaatgattggcagtgcgagagtctccccagttcccttctgctgcatgtccagccacctgggacaacggggcgaggaaattcaactggaaaagagcaagaaggaggaaaggtttctctgcaaaggggtgatcgagtagagaaggcataatgaggagagatggtgagaaaggagagaggggaagtgggagaagagagggagggagggtgggtggtatgagtgtgtacggagatcaagaaagggatggagagggatgaaaagactggggagagagacactggagcgagggctgcggcaggggttaagacccagggctataaggcctggagcctcctggagagaacactcctctggtgtccttgggtggataagatggctcctcccctcctggttcctggctcagtggttatcctgcctcccctctgctgtccagccctcccacccctgccgggctggctgctttgccctcagcagtcttaagtcaagttctccgctaaaccttcttaggggaaacatgagctgtggcaaatgcagcagaaatgatcgccttccacgaactctgttccatgctgggccaagcggggccacagcaggagactgagaggagactgagaggagtctccatctggaactgcactggggcagtggaaagggaggcagaggctaaccagcggtggttcaaggcccctgccactgggtcacatagctcagcccagagagaaggaggcgctctcccattcccaaaacttttcaggagaacagaagtgccatagcctctcttgcatcgcttgctgaggccttctcagggcatgccagccttggctccctagttgcagcgaagtctggagcaggtctgggagggaggcattcctctgggactggcttaggggaggactgccactggaaggagctgggggtagaactccccaggcccagggtgggatcaagaggccatggtccagttctttttcttttctttttttttttttgagacagggtctcactctgtcactcaggctggagtacagtggcacaaccacagctcactgcagccttgaccccccaggctcaagggatcttctcaccgcagcctcccaagtagctggggctacaggtatgtgccaccacgtctggctaactttttgtattttttttgtagagacagggtctccctatgttgcccaggctggtctcgaactcctaggttcaatccatcctcccgctttggcctcccaaagtgctgggattacaggtgcgagccaccacacccgaccacagtccagctcttcagggcggagctggcagctctggggccatctgggttcggggactcttccggactcctcttgaggggttcatgttttgcccgcctctccttgtctctcagtgggggctgagtgagaccttggaatccgtcaggggcaccgtacacactcactttgggccccgggaaatcacaatccttttgtttccctggcagagtggcaggaaaggggcgatgaagaaagaagaacaagcgtgttgggcatgtgggggacacagagtggtttaagcaatggtttacgaagtggaagcctgctgagcctgtagcgccgtggccaggggtgcgggagggagtgtggcacacctggtctcccctaagacacagccacgccctcccaagtcagtcccccttctctcttcaggtctccatttccaagggcacagccctgactgcctcagaacttactgttttgcaaagacaaacattttatttttcatgataggagctgtagcagagtatatgggggcctctgccagcccccaggctgggactggggcctgtgaccttgagaacctcatctcacattctgcagactttggcggcggggcagtgctcgaccactggctgggtgggctggtctcagcctctcctgcaggcccagggctgaaatcataaccgtcaggcccagccttggccaaagataatgcaactttggcagggctggctgctgggagggggcaggcacttgctcctcgtagagcaagagtgggtttcttccctgaccctcccttccaccccggtagggtggtttccttaggaactcaggcctgcgggagaaatggttccagcttctggaggctgggtgggggtggggtgggggtgggtgtgggatagagcccagctcctccaagcctcttagggaagcggcctctttgcattcttgactctctgcttcccccgtgtggctgtgaggctggttgaagccacatagcagtagaggggcgtgtgtgtgtgtgtgtgtgtgtgtgtgtgtgtgtgtgtgtgtgtgtgtgtgtgtgtgtgttggagcgtgggttgggggagggctcagcaagacaggagctgaggcagaatcacagagagatggcccttatctctgcccccgccgcctaatatgcaacattagggcagctacgataccagctttggaatactcgcctatcaaggaatggaaagaagctgggctgggtggcttgcgcctgtaatcccagcactttgggaggccgaagcaggtggattacctgcggtcaggagttcaagaccagcctggccaacatggtgaaaccctgtctctactaaaaatacaaaattagctgggtgagttgcacatgcctgtaatcccagctacttgggagcctgaggcaggataattgcttgaacctgggaggtggaggttgcagtgagcctagatcacaccactgcagttcagcctgggtgacagtgagactctgtctcaaaaaaaaataaaaataaaaaccaagtggaaagaaaagatggggtgatactcatctgcaagggggtgcaggacagctgggtctcctctgaccatggggacaagttccccctgctgagctgccctaaataccacacccagcttggcctgcagcatcctggctgggtggacccaaaaagccacccagaaagtgggaaaaggaacagaggaacagatatggaaggaaatagagtctatccattcctgttttgtagtcagttcttgaccatcaccagctgcaagccaggagccccgtgggtcaccgccaggcacctgctgtctgccacgaaacaggggctgcaggtctcttgctcagactgttgtgtgggcagggcccaggtcgatggggtcagagggtccttggaggttattttcatgcaggggtcttcagaggtgtgcatgcttcagaatcatggaggagcatgttcaaatgcccaccagcatctaagaacagctgatcttgtctattggtcttcttctatgattgaggaaactgaggcccggggggtctggatgatggtgactgctgaaggccatagcaggttcaagggtgtcaacttgatgccaatccccctagtcccatagattggtctgtcaatatggccacaagccacacccattcagggggtggaggggggctccttagcgagcccctggaggtgttggttaggtgcacaggcagtctctcccctacatcctttctgcgtcctgcagcagagcagtcaccaggccgatgacctgcgaggctggctggaccatgtcatactccgcaaagaggtggcatacgttctcctgaggctctgtctggctcttggccacaaacccaaagatcctggtgggggagggcagtctgagtgaggggtgggacccagggaggcatcaggctggtgggaatggggtggtggggggccctcagcctgcatctcattcctccctgcccctcccttagccaattgactccagcacctccttatggtggggctccctggggaaggagatgcctctcccgtcagactgggagatttctgagttcaagctctgggtttcctttgttttgagtgagggctccttgaggacaggacctgtgcattccccattagagtggaagctccctgagggcaaggatgcatcttgatcatcagactgggacattccaatagcttgaggctccctgaagttagagcctgtgcctcttgcagaagattgagggctcccaggctcatgtcacccccaacagcccagaggctctgagggcagtcaaagtctttcccatcagatgggagctccctgaggaccagggcctgtgccctcatcaacactttggactattaaagtcagaatggtgcctctttccttctgcagttccctccccatgttgggtttggggccctgagacaggaaggccttaccaggagggtttgcagtacttctgccacctgtaggaaaagaacatgataccgagtaatgaggcttcgctccatgccacaggaccctggaggagcagcaggactggccagctgcgtccccaccccaccatgccccaccctaccctcattctgtcaccctgaccccttgaggttcacaggctccctctgggatcccaggcccagagtcggcaggacgccttggtgggcagcggggccctggacagccttcttagtttggcccagccttgaacttacttccgttgctcagggtccataccacagaagcggagggtggtgagtgggtaatggcgccggaaaaacaccctaggaggaggcggggagagaagggaagcgatgacagcctgtcccagtgtcatcctgcctccagcatctctcgttccccccaagctcaggtgccctgtcctccaagaagtctctgggttagaccttgaagaccgctatggcctttcccactggggggccctggcgccccgctcctgcctctctcctctcatggggcttgtctgcctctgtcttacactctggggttttctatcacacccctaccacgccatttaattttttttggccactaactttttgaggacacgaattacatcttggtcatctcttgtttctccctgtgaagtgctcagccctggatcaggctcctgttagactgtgagatccgagcctggggaaggaacgatctcattcctctctgggtcccagtggtcagccagtctggccgagggaagatgttccatcaatgggtgcaggcataatcggcacccatgaatactagttaactccatttccttccttccttccttccttttttgagatggagtttcactctgtcacccaggttggagtgcaatggcgtgctctcagctcactacaacctccgcctcctgggttcaagcaattctcctgcctcagcctcccaagtagctgggattacaggtgcgtgccaccatgcccggctaattttgtatttttagtagagacggggtttcatcatgttgaccaggctggtctcgaactcctgacctcaggtgatccgcccgcctcggcctcccaaagtgctgggattacaggcatgagccaccgtgcccggcccccgttaactccattttcatcagtcatgatgaacaggggctttggcagtggagtgaggcctggaggaggcagggaagctgcctggagtcactcagcacatcactggccccgctgggtcatccagaaccctgaacttgaccttcatccctgatctgcagctgtctcagctatcccctccagctctactccgccagccccggagccccagggcaagggaaggcccttacttcctctggacatcagtcagagtgatgccctgctctgtgactttgaagtggaccacggtgggcgtggggaggatgtccctctcaaaggtggtggagatggctttctgcacggccagggctccagtcagggtctccacgctcactgagctcaggtacagggtgtggcagcctgtgggaggcagacactgcgctggggccactgacccagggcccaggttctccctctgcccagggccaggggagggggtgagtctcctgttcaggaatccagtggagctcctcttagagccgccacccaacagaaagtgggtgtgtgggtgatcacagtttgaggccaaccccagagggctttgggatcttctgtggctttgcatcgccctggcccctggccctccagcatggggcaggggaggggatgttgccctgtgtgtagaggtgcccaggaaaacatccttctgtccacacttaacggctgctctcctccccacacctccatcttcaaggtcttggttcattggcaacggtagggacagaagacaagaatggggaaggaaattgttcgtgctcagggcatagagcaggaacagtcactgagacaagtgctgatgtgtgctggcctctgggagtgtgggtcagggacctttcccctggtgaaggctccaggacttagacctgacaccccatagaggatcccagacccagaaccacctctagggcaggtttctcagacctagagagaccctagcacgtgtgcacatgcccatgtgtgtgcaggagggactgtaagttctgccactccccccaccccccaccctgccccacttccctgctggcctctcatcttctgttttacaggggtgatggggagcgggtgtggcaccttgttaaagatgcagaaacaaagctgagatgggaaacacgtgtgtgcctgtgcgtgtgtgcgtgcatgcgtgcgtgtgtgcagggttgggaggtgccctcttggggcacagccaagcttggcgcctcccttcctgtaccactcacccgcagatttcttctggcaggaggctgggctgtctgtagagtccgaggccccatctgcacctcccagttctgagccaaggcaaagaaacaggccccccaaaggggcgggggtggagtgaatggacccctctcacaggaacaggcctcatgaatccctttgaagatctcccacctccacccccatctccaggaagtgactcaaaccaggtgtgattaccgtaattaggcaaacaggccactttgggctccctaaatgcttagtttgcaacccttttgatctcttcatcccctcctcgcccccccacctcttagatggctgccatgatcttgtcctcacaggcccctgacctcctcacttcttttggaccctgtctcaacccctgacctgtctttgcagaaagcgaggaggctctcaccatcgctcctctggggctcccttgccttgatgcccttccagaaacagcccttctcgagcttctcctgcacacccctgagatgatctatttcatctgagctgcccccctacctggctgtatgctctggatagggcatgctgatctgggttcaaggtctgactctgtgggcctttgggcaaattacgtaacatctagaaccctcgttttcttttccttcctttccttccttctttctctctttctctctttctttctttcttagatgaagtcttgctctgtcgctctgtcacccaggctagagtgcagtggtgcgatcttagctcactgcaacctctgcctccccggctcaagtgattctcctgcctcagcctcctgagtagctgggattacaggcgcccaccaccacgcccagctaaatttttgtatttttagtagagacggggtttcaccatgttggccaggctggtttcgaactcctgacctcaagtgatctgcccgccttggcctcccgaagtgctgggattacaggcgtgagtcaccacgcccagcccttattttcttatctgtgaaatggggatgataacagcaaagtctacttcacaagcttgtagtgaagcatgaatgggtgagtgagtgctcaacaaatgctggacctggaaagagaaaacctctccaaactatttgatttaggctctttcaccctctcaaagcaggctgctatttatccaacatccattctatgccaggcattgcgctaagagccttgcccgggctatctctttcggtctgcacagcaatcctataagtaggtatgatgaggaaactgaggctcagagaggtcaacattctcaaattttcacagctaggaggtggagatgttgagcgactccagtgcacacagttttaaccgtgacactaaaataatccaccaacaaggtaggagtgaaccccatttctaatgagaacaaacaggtcccccaccttggcattgcctctttggggcccagacccacctctctgtgggatggtgagtttgcagggcagggccagggccatgatggaatgctggcacacgaaggcagagaggctccctgaaaggaagcaagcagccctgcatgagtagagcttccccaacccacccctcagctcacaacggagacttcgctggccccccatcccgggggagcctggaggctggggagtctcaccaaagtagggctcctcatctgctcctttgagatgcactcctttggcagacgactcgatgaggaagtgtcggatgaggtcattgctgtcctcacctggacagagaagaaagagtgcattcggatagaattccaccttgtggccgggcgcggtggctcacgcctgtaatcccagcactttgggaggccgaggtgggcagatcacttgaggtcaggagttcgagatcagcctgacccacatggtaaaaccctatctctactaaagacacacacacacacacacacacacacacacacagtcacacacacaaagccgggcgtggttcacatgcctgtagtcccagctacccgggaggctgaggcaggagaattgcttgaacctgggaggcagaggttgcagtgagccgagattgtgctactgcactccagcctgggtgacacagtgagactctgtctcaccggaaaaaaaaaaaattccaccttgtccatccccctgcctctccctcccacagaggaggtgccaacacatctgctcaatggctccagccacaccctcttcaggaaacctttctcttcttctttttttgggggtggggtggggaaacctttctgctggtcaagagttatcagggatttttttttttttttagacagagtcttgctctgtctcttagactggagtgcagcggcatgatctcggcttactgcagcctcaacctcctgggcttaaggaatcctcccacctcagcttcctgagtagctgggactacaggcgtgccccaccatgtcgggctaattcttttgtagagacaaggtctcactattttgctcaggctggtctcgaactcctgagctcaagcagttctcctgcttcggcctagggattattttattttattttttttagacagggtctcattctttggtctaggaaggagtgcagtggtgtgatcatggctcactgcagcctcaaagacctcctgggttcaagtgattctgctgcctcaggctcccaagtacctgggactacaggtgtgctccaccacacctgggtaatttttgtagcgacagggttttgccatattgctcaagctggtctcagattcctgggctcaagtgatcctcctgcctcggcctcccaaagtgctgggattactggcgtgagccactgtgcctggcaaggaaacttcttaattatttagataaatgtcgactctttggtctggtttctgtctccccctgcccaccaggtcatctctgctggagccacgctggccccgggggtggggaggtgaacaatgaccttctgactcctttccaccagtccacagtgtcctcctcagtctgggctcattgcctcttgcaaggcgtcctttataagtaacaccctccccagaggtcactttcttattgtgacagtgaggcatactgtcaagaacacaaggctgggtgtttcatcctccctttatcacttaattgctctggagtcattaagtaactctgggagcctccgttatctcatccgttaaataagaaggtgcaatcctggggtttgagtgaggcctatgacccaggtaccttgtactgtaatcatctgttttcatctgtctccctagtgaggtggtgtctgtgtctgattccactgtatccctgctgcctcacacagtgcctggtgtgtggtgatgctccatagatgtttgctatcaaataagcatgggagaccacaggaaagcatataagctatcacacacatgtgcgctgagctagtacacaaacctggtaagctatcacctgtgagataagctagctgcgtgtgtaatcacacattaggttccctggaaatgaatccagtttgactccaagaagagcagcctagagggggctaggaccctcctccttctctcccaccatcagaaaaaagcagggaagtgggggtggggctcgggaaggcagaagcacgcaggcttgctgtgaaaggcgtttttcagggtgccttggggctggagggcatcggggagaacactggggtggacgcttctcctaggagctgttataagactggcgccatgtcaccctgaaagctagtgccagagccaggactggaacctaccacaccccgctgcctcagtgaggccttgagtgagcacagagacagacgcatacctggtcgactctgagcagacgcgggaacctcctgcaccttcagggccaggccgaaggagcctcggtatgaagagctgtcccttatgacaaaagcccctggctcctccttcctcagcagctcgattgctggaacaatccttgagtcagagatggacaccgccccacctggacaccctgtccccagccccgtagggtcttcacagagcagatgttacagagtcaccttttgtccccaggaagtcctttgtactgtcaaatctccaccattcttgctgtggttcctacttcctcgggaggtcatgaggtcagcaggacatccccctcccccgcttcccaggacccactatttgccattccttaactgtaacccagggccctgcctgatgcaaagtgcaagacccagaccctattctggggtcactcgtgcttccttttaccttgctctcgggtgatgtttggcttaaaccagtatttagatgtgtccatcacgaacttcatggtgggctgcatgtccctggcgggacctggagacagacagagaagggggaccctgtaggctggacagacgggagctgagggatgttcaccagagaaggctggagacccttccctactctattgccccaaggtttcattcaaccaccatcccagaccctaaccccattgtatctccaaactgcctacgatgagggaaaatcaaacagaaggatgccagggtttggtgcatctagaactcagaagtgcccttgtatccttggtaatgaataaggaatgaatagatacaacctcagtttaaggagaaatggtttcttaaatctactgttgagtcccctggtgaggactgaaataagagataaacaaggaattctcaaatgcatcatgtttgatattacattctccttcgtcttcataatcctaagaattccttacgggaatattcagcttggaaaagaaaatggcagaaaacgtgaaggagaggaaaatagcagatctgggcagaaaaacatgcccctgggaggcgggagcctggatcttgactctgatatgggataactgaagctcagaggggaccaagtggactaaacagcttctgagggtctttaatgttctagtagtctatggaattaaaatgaattttgttttaggaatattttgcagaatttgataagatctgggggtatagttggtgatattatgggaccaaagcaggatgggaatatcactaggctaagtaaatgtgcgctttgggatgccaaaatggccatttccctgggtccctaaggcagagagcagtagctgtcaaccttggcggcttgaaaaggagtgttgtgaccacttactctcaagtaactcattcaaaaaaagtactaaaatctgcaaatgatttgtcctaggaaagcgatcagggcagatgcaaaggcacgccagaagtgtcattttctcctgcttgcctccacatggcttcgtgagtgggagtgagcagtgggctatagtaaacattccacccccaccccctctggagtcgccttgatgcctgtgagcgtcatggccaagtgggggctgagaagccccccgatggccgagggagggggaacagggggttggcaggggactctgctcatgggagaggcatccacagggtgctagagcttagcttctgggtttactgcttgggtttgttcttcttggacgcctgtgatctcagactccgggaaggagggtgtttgctgttttgtggttttcggctgtctgaactggaatgcattgtctctattaccccatccaccccctctgtgttctcatcatctgcgaacgtcagagtcagaactgactcgccctcttgctctccttgagttagtcatcaagcacatcctgagggtcgcctggttctgtcctctctcctccactcccactgccctatcccggttcaggaccctgctatccgttgagctgccagggtgatccattgagcgagcacctctgaccccatcactctcctgtgtgaggaggctctctgatggtaccctattgcttaaaaggcaaattccatttttttttttttttttagcttggcatttaaggcctttcacaatctggtttcaaattactctcaatgacttgaacctgcacccaacattccggcatttcctgaacatgccatgcgcttccacaccttcatgactgtggaccccctgctttctctgctgggaatgcctttcctctccttctctggccacaaacttctgatccatttcccagatccagctcggatgtcgcttcctctgttctccagactgaaagaatcattccttcagctttggccaatatgattgagaatatctctttacctccgcgtttatcctaccctaccgtgatgatttgtttttgtctctttctaaactgtttccctctgtgtgtcctcactacctggcatagtgccagacacacaatagttgctcaataaatgtgttgactggctgttgcagaaacccactggcactttgtctattccccaaatcttacattgcttcaaatattggtttacgacgtaccctctgggcatgtggtaaagggggcatctgacagggtctggctgttgctcctggtggctggacaggggttgctgggagaagcagctccaggttgaacggagttctggtgtcctggggtccgctggggtggagaagaccctggttctgggcagccgttgatcagcacaatgggtatgtccaccatggagttggtgatggatggggggcagctgctggcatgttctttggccagtggtggagagtggggtgttctgggttggcccatggttagggtggggtttctgggagcctggaagtcactgggtcttgtacacagggacactgagccaaggctgtggaggctggaggaagagttggctggactttccaaggatctggaagatgactgatggctggagttgctggagtgcaggagggactggctgctgcagcgggagagagtcagacagggtgttagggcaacaggtggctcaggggctagagtcaggctccggatctggtgatctgggttcccatggctttaaaggccaaatagaacactgcataccccaccccctacagcccacagcaaagtgcatgcccacctaatcctcaagggatggtaaggatacagaaatgtccttggatggtagggtctttggtcacttaaagtagccaatgagctgacccctgcaggctttgggcataggctggcccacattccgtctgccttcccagccaggccgttctgactgagctgtcggatcaggatcccttcaggcccccatgactcccaggagccctgcagatgggctgaacctacgctggaccacaccgtggctgatgcagagggaactccccagctgcaggagaaggccagcttcacatccagccagacttcttcctgagctcaggggcctgtgccagtgggcatggctgtggaatccccagcctctgtgccagggactgccttggccagtggctttggaggtggagtgggaagcagagtcctgtggttcggtcttcctggggcagaatgggtgcgcatgtgcctgcagttctgctgtgaggtctatagagaactgagctgggatgattgtgattcccaggcagggctgcctcactcctttgctaggttttgccagcaacagaggaaggaacctttttattcctaaatagttcatctcaggccccccaattctatttatagccctgtgttttggggtttaaaaaaaccttccttgagatgggttgtatgagggctggaaaggatatagatgagcctcattaaggcaacggctcttttaccaaaaggtagctataagtcaagactttttatattgaattgtattctaaatgcttgaggacagcttgagatctgaaaggctgtaaaagcaaacatttgcttctggttttggtgcatgcccagattttgctcagacagagcagggtccctttcagtgattttagggggtgcatgcgtgcgtgtgcctgtgtgtgtgtgtgcaatgttagaagctacagaacctaccttccaaacatatagctgacatcagacactgggctggctgacagcacagagatcctgctgccccgctgtggggccaggcctcccagccgcttctccagtcttggagaagccaccagcggggagcccaaaccatgggggctcgaggccttgctccccatgcaagggattgagatgctgggggaatttgggggtcgaggggagagaccctctgaggggggcagagggcgctggtgccccctgccctggttcccagagaagatgaggctctcactgctgcttcgtgtctctcgggggacgtctctggaaaggaggaggccaccactgcgaagggagccgaagggcggggtgacagaggggctggagcagtgctgggggccatcgtggcaccttgatctggcggaggtcacctcgatgtactttatgtctttgggggagaaaagcagagcattggtgaaatgcaggagcctggactcatagaacagagaggctggaagtatcctcaaggtcattctgtcccccctcttttatagagacgaggacactgaggcccagagaggagagcccaactccaccttcagggcccagttccagtcaccctccctgtgacaacttcccttgggtgaggagatgcagtaggggacccaggccttggaatcagacagacccaggcttcagatctggctctgccacttattttctgagagagtttggccaaaagacttcaccacccagggcctcagtttccacacctgtaaagtggggcaactgcattcagccttttggtgatacaaaaaggatgaagtgaaactcatgtaggcagcacagcactgttcccggcacagaccaggtgcttaaaaactgggcaactctctcctttgtctgtgccctgttcctaggttgaaatggccacttgatgggttgtaccagtgacactttctgatgcctctgctactcaggatgtgtgaaagtggtttctctgaggctgggcgcggtggctcacacctggaatcccagcactttgggaggcctaggcgggtggatcacctgaggtcaggagttcaagaccagcctggccaacatggcaaaccccatctctaccaaaaatacaaaaattagccgggcacctgtaatcccagctacttgggaggctgaggtacaagaatcgcttgaacccgggaggcagaggttgcagtgagccgagattgcgccactgcactccagcctgagtgacaagagtgaagccccatctccaaaaaaaaaaaaaaaaaggaagtggtttctctgtacctgcagtgaaagcagggattctcaagcttggttacacactagactcaccccaggctgcgccttgtgccaattagattaaactctccagggggtgaacccaggcctcagttttgtttgttttccagtttttcaggtgagtccagtagaccatgaatggctcagcaggaccacatcacctgggctccacccctacagaaacataatctgcattttagcgaggccacccagggcatgtgaatatgcagtggagtctgagaaccctgctttggagcaggcactccctgagcacagggcttgctgcattcttgagctatggatctcctggggatggtagctggtacacaggggtcacccaacacaccccaggctgccgacgcgctccagcgctctttccactccctggtcggggcatccaggactcttgggattctgaggccttgttcctctcccgaggtcggccttgcagtgggctgctctgaggttctccccaaggtgaggatgaacacccttcctcctgacctgggggaagggaattgtccttggtgctgttccagcaaagctggaggaaggtgggggttaatgagccgctcctttctgaagagtgtgagtcttgcctctagcttcctgggatggaggctggggaaattggggagaacgtgcaccctcagctcccacctgcctggggccctggcacatgcactgttcctccccattatgactgtggagccccagcctgccccagcccgctcctgggtagggccatctggccctgctcacagttactgcctctgtctgagcttgcttgggccacggtgggggtggggagttacatcagatgagcaagggctggcagctgactgggacttgctgctcagcgggtggaggaagagcctagctttgtagcaaaacaaacctggggtgagtcctggctttgctgcttttcagccaagggcattgtgcaactttcctaacctctctgagcctcagtttccttatctgcaaagtgaggatctgaaaccagtcttccaaggttgtgatgaggatgaaatacaatagccgggagcctggcccatggtgaggctcgagagaggagcatttcctacctgcctgctttttggggacagtattggccaaatggagcccttttctggctaaggtggggatctctctgcttagaaagatgactgcaagaagagagtgtttggggcactgcattgtgggctctggaagaaaagagatcttggaatgggttggattcttctggaaggctggaaagcacaacttcaatttttataggactttatagtgtttacacccataatctcctctgaaccttataatagcccttgagcagggcaggcattattttttacagaggaggaaactgaagcttggagaagagtggggatggagctaacacttagtgtacaacgatgtttcacagagactggtctttattgagtgcaatgtgccaggaccactacgaacacattgcttgtattagctcctttaaccctcatgacaactctgtggaagtaggggatattattaatgcccatataacagatgggaaatctggaaggctcagaaaggtgaagtgagttatccaatgctgcacagccagggagtgttgttgagctctgtttagggactgcttcttccaggatgaggaggggctccttgggaacctgctccaaggccttgccctgtgagaaggtgcttggctgctttggggagggtctcttggcacagtgaagctctgggctccctactcactgggccattgaaacatccatcagggaccttgctggggtcactgagtaaggagagcgggaggggagggaggagccccgtgctcacctcaaggtgggtgtggctggggggtggggttggggcctctacccattgcaggggtgcagtcgctgtttactggcctgtggggcaagtctgagcagtgctgggtgggtgccggcgccagccccaggcaggcgggtgagtggagggagggcgtgtgggtgaggggtggagagatacttattaaatacccttcacttggggcgggtaaacagccttgcctggcagacattgttggaaaatgaaagtggggggcctgttccaaagatggggtgcggggtgttggagaggataaagaaagggatatggtgtttgcttctaggaaccacattctctgtgggatgggggcccccagggcaagtttaaaggaaggcaggggcagggaacctggggaaggtttgtgaagcacccaggaggtcgcgcctcagaagaggagcctgcaggctgcctccaaacggatggattccgtgatgccccagagggcagaagactagactttagaaagagagaaaggacagtggcctatggagcccagagcctgggatttgaggcctgacctatctctccctgactgtgtgactgtgagccatcacgtacccaccccgagcctcagtttcctcatctgtaaaaggaggtttccactatttccttcaaaagccagacactgggatcatggattacatggagtctttttttttttgagacagggtctcactctgttgcccaggctggattacagtggcgggatcttggctcactgcagactccacctccaaggctcaagtgattctcccacctcagcctcccaatagttgggactacaagttcatgccatcacacccaactaatttttgtatttttagtagagatgggttttcgccatgttggccaggctggtacatggactagttttttttttttttttttgttttaagcctgggctgggtgatatggctcatgcctgtaatcccagaactttgggaggctgaggaaggaggatttcttgaggtagcctgggcaacatggtgagactccatctctacaaaaagtttaaaaattagccaggttggcagggcatggtggctcatacctgtaatcccagcactttgggaggccaaggtgggcgaatcaccgaggtggacgaggtcaagagttcaagaccagcctggccaacatggtgaaaccccgtctctactaaaaatacaaaaaaattagctgggcatagtggtgggcacctgtaatccctgctactcaggagtctgagctatgagaatcgcttgaacctgggaggcaagactccatcacccaccaaagaaaaaaaaaataagaaattagccgggcgtggtgacatgtgcctgtagtcccagctactggggatgctgaggtgggaggattgcttgagcccaggcattcaaggctgcagtgagctatgatcacaccactgcactccaggctgggcaacacaacgagactctgtctcaaaaaaaatatgtatatatatttaggggaaatgtcaatatagaattgccaatgtttaatttttaaattctgccaagttaggacaaaaaggaaaagtaaacatctcctagcacggtaatgtcagagtgtctttccttgaacagcccaaaagtaggaaggatgagattgtaaaatggcaggggatcctccactctgaatacatttcgaggtaagagaactcaccacaacgctcagagttgtacactgctataggccagtgagagatttgtcaccagcagtagggtctgcggggaggattttgggtgcaggtgtctgctgttcttagtgatggtggagaacttcccagtggggagctgacctggctgggttgtcttaggaggtagtgagctcccaggcattgcaggtgtccaggcagacgttagaggaagagattttttttctccatcagaaggggccagggcacagagaggcagcttcctcaggaccctctggccactgcctgccttacattccctgttccccagagttgggtggacacatgttcacaatggcatgtggtgcccagggcatctgtggatgtggacccatgccatcagccctaagctgatcatgagccccttccgtggaggaagggcctagttgtcaccaacccccacccaacatttgaggacgttccacagggactggttttgccccagctggccttggacatgtggaaatccagtcctggggcatgaacggtaaaaccctgggcttgctcctgccaacagtaattaggcccaagatgcctttcctgcagtgacatgcccatgactgactggcctgaagaaacaggaagacccttgacggacagtttctttaacaggtctggcaggcaatgcttggtgagaggggacagagcaggcaggagcccaggagcccaggaaccctgggtgccagagggcctgggtgctgggctggcctccacctcagagcccaaacctggggctagcccaacgtgcaaccccaatgtttaataaaaacagctaccatttagaatggcatatggtgtgccaggatttgtgataagcagccaaaaaatgtaatttctttcaatccccataacaccctttgaggtaagaactctcattatctccatttctcagatggggaatctgtgacacatagcagtgaagcaagcagcttgtgaaagctctgcctgacgccagccattaggctagactggctccttacttaaccccagcaaccccagcttttcatttgcaaaacagagataaaatattcggcagggtgtggtgactcacacctgtaatcccagcactttgggaggccaaggtgggtggatcacttgagctcaggagttcgagaccagcctggccaacatggtgaaaccctatctctactgaaaatacaaaaattagctgggcatggtggcaggtgcctgtaatctcagctactggggaggctgaggcaggagaattgcttgaacccgggaggtggaggttgcagtgagccgagatcgtgctgttgcactccagcctgggtgacagtgagactccattgcaaaaaaaaaaaaaaaaaaaaaattcagctcagggagtggattgagaggattgaagattctacataaagtgctcagcacagtgcctgatatgtgtccagtaagtgtaatatcttatggctcctatctctaatcctaatcatgcaccccttcacccttgctggtagtttaaagccttggaggcctcagtcttccaacctgtctgatggctgctccttgatcctcatcaagagcatacttgaaactctttgttcaggaaactgaagccagatgtaggaatttccaggttcctttggactcggtggtgccctggaattggcttgtatcagctggttaagagctgattgttaaattttcaggattttgtctagctagttactaaacccagccattatgaataattacattatgtacacttacaatgaaataacttacattaaaaacaaaggtaataaatacttaaaattcgtcacgtcccaattattttacgacagtgtctccccaccctccatactattatctgtgctctcagggttatttacatctattgtgttggtgtggtggcaatgctgtgtgacagcctgctactccacatgtctccagctcctcattcagtgacatcatgttggtagtttgaaattggccacagtgggagaattcatactgtggaaatgggcagaagcttcaaatcagctccctctgcccctgctccccaaccagagagccaggtaaacattcaccagcataccactgcttgaacactaccgggtccttatcctaaacagatgccccaatcctaccatttccagcgtgggcctctccagaaagatactcccctaaacaaggacagaggtcccaatagcaatcctaccaaaatttcaggggggcccaggttaggctctgaagtgagacaccctaggacagtgggggtcagggatccacatttattgagctcttctttatgggcacggcactgcacaaaacactttccataggagcttatttaagtcctcataaaatcatagaaaatcagtatctatcactttccaaactcaggaaccaaatagaattggctagtgagggaagcttgtatttatcccctttgtgtagcacagaaaacagaggggttagtaacttggttaggtttgcacagcacctcccaacaggacagggtccccttctctgtacataggaaaatccttcttcctcatgaggtctggcaccaagcccccctcctggtactgtgccccaaatccttacccaaggcttcagattcctccttctttctcattgacatggtgctctgggccagctcagcctgggagcccccagtccctgggggaagcagctggaaggtggggtccagttccaggatcatctgattgaggctctccagtgagaagtcaatgtaggagtcaaggtcctctggggtccccaaggccttctcaccaggggacggcaggaagcaggtggctttggcctccacctgtggggcttgctggagtcggccagggggccccatgcagggcacgggggccatcagggcctgggctccccagccttccgtggtgtagtaagaacactggggtggcaggctggggctgggtgctgggtgcagggtcctcctgggctcatcacaaggcgccaagctgacagcatggcctcctgccagcagtgggctggacatcacctgggacatggtgggggtggtgacctctgcagtttacctctggtcttcaaccagcctcactgacatcccagagatctcacttgctaaccaggagctcccaggatctgaaagagtccaagagtgggaacggagtaatttctgtaggtgaagcccctgcctcccaccctccgtacaaaggctaagttattcattcatttaaaagcatggatgctggagccagaccacctgagtttgcagcctggctccaccacctactagctgtataaccttgggcaagttaattgacttctctgtgcctcagttccctcgtctataaaacaagttaatcattgtaatgtgcttagaacagtgcctggcacataataagcattatgtaagtgatcattaaataaaataacttcagtagatgtttattgaacatctactacatcccaggtgtgtttattaagtaaatactacctaacgtttgctgagtaattattatccacataagctctggtatttttagataaaggctttaaaaatccttataacaactgtataaggtaggtattattatcccattttacagggagagaactgaggcacagagaggtaggtaacttgcccaagggtcacactgccaacaagtgtagagaaggactgggccctcggctgcctgatgtctgagcacctgcacttgggccggttggtgaaacagacaagtaagtgggtgaacaactgtaagcagtgtcacgagagaggagggaagggacagtgcacttttctagttcagtggggaggttagggaggtcttcctggaggaagggacacgcaaagggagataagaaggaaaagcaagaggtagctgcgcaagttgagtagggatgaggaggcagagaggaagatttaagttagaggggatgagctgggcgtgatggctcacacctgtaatcccagcactttgggagtctgaggtgggctgatcccttgaggtcaggagttcgagaccagcctggtgaacatggtgaaaccccatctctactaaaaatataaaaattagctggcatgatggcacgtgcctgtaattccagctactcaggagactggggcaggaggattgcttgaagctgggaggcagaggttgcagtgagccgagatcgagccaatgcactgcagcctggatgacagagcaagactctgtctctaactaaacaaataaacaaataaataaacaaagtagaggggaccatttgtgcaaaagtctggccagcagggaagctcacaagaccctattgagcacctgagtaacagagcacctggggtgggtggaggagatggggcgggggaggcaggctggccagatcccgtagggccttgcaggctgggctcaggactgccagctcaaccctgagggcaacagggaggctctgaaaagttttgagctggggagtgacatcatcagatgatattcatttccttggggctcatttgggaaagagatgtctcaacctcctcattttccttactgtgaaaagtcctttccattgtctaaccttaatgccacatgctagtttcttgtaggtggggcttggtaaggaggtaagaagttctgggactgaggctgccaagaaaactgtacagagctgcaatgtgctggttacactcccattgcctgctctgagctttgctgctggtccccagcccccaccaacaccccccaactctctttcttctcgttgccaaaacgcctcctttacgtcctgttttggagtcagaccttagcactggaaaaggtatctgagactagcctgggagaagagaaagtggactctgggatccgaaggtttagatttgacttctagctcaaatagctccttatggtgtgactctgaccctgagtttcctcatctgtgagatggtaatgagaattcctgcaccctcccagagagtgttatggaaccagtgaggtgctccttgtgaaggtagttaggcaattctaaatagtacttagaaataaggacttatggagtataacagcctcataatagtagcttccatttattgagcgctgaccatgtgccaaatagtttacatacgaattacattggtaactcaatcctctcacagctctaggaagtactgcaccctattgtcagtcctcttgtttttttttcttgagacaaggtgtcgctctgttgcccaggctagagtgcagtggcacagtcatggctcactgcagccttgacctcctggggctcaagcgattctcccagctcaccctcccgagtagctgggactacaggcttgtgccctatacccagagaattttttgtagaaagagggtctcactttgttgcccaggctggtcttgaactcctgggctcaagtgctcctccttcctcggcctcccaaagtgctaggattacaggtgtgagccgctgtgcctggccttatttatttattttgagttgtcagtccattttacagatgaagatgctgagactcggagaggtcaagaaacacgcttcacatccagaaagatggtggagctgggattcaaacccaggtgtgggattttggaatcttaattccttatgctaagggaggagaccacccctcatattgtcttatgcccaatttctgcctccaaagaaagaaaaagtaaaaactaaaaggcagaaatgaaatccacaagcagacagcccagcgccacaccctgggcctggtagttaaagatcgacccctgacctaatcggttatgttatctatagattacagacattgtatagaaatgcactgtgaaaatccctttcctgttttgttcccacgtaattaccggtgcgtgcagcccccagtcacgtaccccctgcttgctcaattgatcacgaccctctcacacgcacccccttagagttgtgagcccttaaaagggacaggaaatgctcactcggggagctcggctcttgagacaggagtcttgctgatgcccccggccgaataaaccccttccttctttaacttggtgtctgaggagttttgtctgcggctcgtcctgctacaatgccacatggaattcaagtgcagagggacacctgggatctagagagggggcatgattggctgaaggtcgcacaggtttcatgagaaaagccagggccccttcccctctcctgcctcccccaacgcccgtggctccggtaggtctgatgccagacttttccttggccaggtcctgcagggggcggggcatcccgggcacgggaagctttctataaatggaagtggaagggagccggcctctgcgctcccgccctcccgggacagctgaggacacagagccggaaccacggctttttccacacaggctccaagtggactgggtttgttgggacaggatctgggcgctccctgcagggttttctggctgtgtcctgcagaggaggctggggctgctgactttgcagagctcaaggagggctgggtgtcccctcgcaaccaggacccagtatacctgcttactaatttggacacagcttttgtgccacgctgggcaagcgtcctttcctctctgggcagacctcagttgtcccatctgtgtgatggggatgtgataataacagacactgaacaccttgcattttctcaacagctctctgaggagggtgctattgctgcagggctggagaggttgaggaatttgcccaaggtcatacaaccccaactgtgaattggggtttaaacccaggtggtcttgctccacggtcccacacttttagcctctgctgctgcttcacatatttaagaaccctgtccaccgctgccccttctgggattctggaaccaagagggacagacctggagctgagcaaagggcaggcagcccctacgctcctcttcagcctcccctcacttttaaggctctgcgtcgcccttggatgtaccaaggcagggctccatcttactcctgtattcctgaatgctgcccccttcgcggccccgcacactcctctaacttgctctttcttgctgtaagtggtggggagagtccctgggcccggggctctgtgtggttgggaggcacggggcgggggcaaggagggctccagccacctctgctctatttgtaggtgccccctacccgctcccacttctgattctgactcagatctctttctttgttcccaaggactctggggagtcctggtgccttggcaaatcccctcttccgtgtcattgccaacctcttctcctgacttactctctcccaatgagcccaggtcagtgaagggagagggtggggcaagggtaaagcctgagtctcccccaaagcactttgcctcattagcccaatctccactgcaccccctatttttgaaaactggctcccgatcttcccatccctcccacccagacccggtgacgcaggacgtggacctcaggcagggacccataggaccagtgaaggccagccgccccatctcccagtcctgtctacctctgaagtgcccagagggctcccagagcgctgggaggcgagaggcctgggttctgtgtccagtccctttccatgacctcaggcaagcctcttctctgtggccctcagctctctcatctatttgccgaggggcacaggtttagttcccttgaactgctgaactccgcggtctgtgatcctgagaccatctctgtctcatccacatcctccaccccatttctccccaccttcactctgagccctgagaaatggagaagctgaagacaaaaggttaaatgaggctgggctcacgcctgtaattccagcactttgggaggctaaggtgggaggatcacctgaggtcaggagtttgagaccagcctggccaacatggtgaaaccgcgtctctactaaacataagaaaattagccgggcatggtggcaaacatctgtaatccctgttacttgggaggctgaggcaggagaatcgcttgaaccctggaggcagacgttggcagtgagccgagatcgcgccactgcactccagcttgggtgacagagcaagactccatctcaaaaaaaaaaaaaaaaatgtttaaatgaatcagggccagcaaaggtgctccgtgttcctctcttcttaaagaataaaggcacctacctggtgtccacaggtgggcagactgttgccttcactactggctcctgggaccaagacgactcagagtccaggtgaagagtcaggagaggcgccagttcacctccagacctgccttaaaagcagcttgcccgccttctctcctcccctccgggcgggccctgcacgtggccctgacagcagtaggccccacccctgctggatccagtgagctcaggtggggctggcacaggcagcaggaagggaagcactgggtggtgggttttgggtctgggtgtgtgtgaggggctcccaagttcctgcttgggcttctcgtggcaccacatggccagggagtccttgcttggacagggcatagctagaatcaaggtgtgcagtgggcactcctcaggtgctggctggggcagaggccatgggttggcagagctggcagagagtgagggccttgacaaagcaggatgccagtgggcaggagaccctctgcagtccccctttgtgctgggtcacactgggacaggcacagggtaagggcccactggaagtaaggctaggcacgagcttgtcttttcttctttctctccttttacagtaatgactctagcttgggatggggcctctaactcaaggaaaggaggctgaagtgtctggagggctttgagaaggggcttatagctgttccttcactcatgggctatctctgtccctcgtctggtctgtgccccagggtggaagttccctgaggggaggacattggagggtgagatcaggaagcccagaagtctggtctggtagctccttctccatggttccaactctctccctgttctagaggggcaggggtcctagaatgttgtaaggaggtgttcagacatggtgaggggagggtgctgatggcagagcctggtctgggagcggtctgaagtgagggagctggcgaagtctccagcccagggactcatggtgatcccagtaggctaatctcaggggtgggttgccccatgcccccattatgcccagtggaagggcttctggccttacagtttttgatgccctggggtttcactgaggcatggtgaactagtgcatgggaggccggtgagcaaagctatggaaagttatataaggtgccccttcctgatggtgacataaaaggtgtccctaggtgtccatgcagccttgttggcacatggcttgatgagcaattatgtctttggatgaaaaatgtggtgctcctgccctggagtggatgtcactgcacatggcggcttcccccatgaggctgtggctcatgattgtgggagagtgggaggggcgactcgtgagtttcttgagtggaaggggcaggttacagtagggcgaagtgttgggcagagactgtggcaactccggggtaaccctggccatctcccctggggctggtatggatagcctctgcagtggttcttcagggccagggggtcctccagccttacagacccatacctgggggttatggtctttcttggcagattggctcttttgtttcacacccagctgcttcctttagcttaagatggtctcagaacagtgatttcagccccagctgcctcacaaaccctgcccaacaccacatcactgccctttgccgtgatcatcaagggatggatggagtggcatttctttatacatctatagatatgacattttttctttagcctatggatgtgatagattacattaatttacttttgaattttgaaccctccttgcatacctgggatgaaccccctggtcatggtatataattctttttttttttgtgatggggtcttgctatgttgcccaggctggtctcaacctcccggactcaagtgatcttcccacttcagactttggagtagctgggattacagacatgtaccactatgcctgggtctgtataattcttctaatacattgttgggttcaatttgctaacattttgtggaggatttttgcatctatgttcatgagtgatattggtgtctagttttcttttgtatctctggtttcagcaatgctggcctcataaaatgagttgggaagtgttccttctgcttctatcttctgaaagaggttgtagagaagtggtcctatttcttcctcaaatgtttggtagatttcaccagtaaaactgtctggtcctggtgctttctgttttggaaggttattaattattaattcaattctttgctagatataagcctattcacagcatttcttttcaacctcaaaatacactatttccctagttgacgggggcaccttgtcctacatctactcttctgaaagaagggattccaagtagattaaaaaaaaaaagtccagcctatattttgatgtattctgcatgtctctcactaagggagagggaaaatcaattaaagaaaccaagaaatggccgggtgcagtggctcacgcctgtaatcccagcactttgggaggccgaggtgggtggatcacgaggtcaggagatcgagatcatcctggctaacacagtgaaaccccgtctctattaaaatacaaaaaatgagccgggcgtggtggcgggtgcctgcagtcccagctactcgggaggctgaggcaggagaatggcgtgaacccaggaggcagagcttgcagtgagccgagatcgcaccgctgcactccagcctgggtgacagagcaagactccatctcaaaaaaaaaagaaactaagaaatgtaatttctgactgagtttttttcttgtagagaacccacattactcattcattcaaaatacatttatttggctgggtgtggtggctcacgcctgtaatcccagcactttgggagggcacactgccgaggtgggcagatcgcctgagatcaggagtttgagaccagcctggccaacatggtgaaatcccgtctctactaaaaccacaaaaactagccaggcatggtggtgggcacctgtaatcccagctactcgggaggctgaggcaggagaatctcctgaacctgggaggtggaggttgcagtgagctgagattacgccactgtactccagcctgggtgtcagagtgagactccatctagaacaaacaaacaaacaaataaacaaaaaacaacaatttattgagtgcccctgcattcagatgttaggatatagagatgaatgggacaaggctcctgcccgcaaggagcacactgttcatgggggagtatgactcatagacagaaaggcccccaaatctcagcctggtgcaaccaagaggcctacaaaaggctggagctgagccatcttctgtcagcgttagtcgtgtgtggatacggagcgcctgaaatgtggctagtctaaacaaagatgtgctgtgggtgcaaaatacaattcagattttaaagactcagtatgaaaaattatatgaaatatctcaatagtaattgaataattttttttttttctagaaatgcagtaacattatgttgcccaggctggtctcaaactcctggcttcaagctatactcccacctcggcctcccaaagggctgggattacaggcgtgagccaccatgcttgctcagtaattttttatattgattgtgtgtggaaatgatgctgttttatagatactgggttaaataaaaacattattaaaattaatttcctctgcttctttttactttttaagatgtgttttattagtttctcgagactatcgtaacaaattaccacaaacctgatgctttaaaacaacaaacatttattctgtcacagtctggagcctgaaattggacagagccatgctcctttcagggattgaaagggagaatccattccttgcctcttcaaatttctggtggctgtcctggaattcctgggcttgtggccacatcactccagtctcagtctgtgtcttcacatctccttctcctcttctgtctgtctaatctccctttgcctcccttttattttctttattttgagagagggtcttgctttgtttctcaggctgaagtgcagtggtaccatcatggctcactgcagccttgaactcccaggctcaagcaatcctcttgcttcagcctcctgagtaggtgggactataggcacatgccaccacacccagctaagcttttaatttttttgtagagatggaagtctcactattttgtccaggttggtctcaaactcttggcctcaactgatcctcccacctcagcctcccgagttgctgtgattacaggcctgagtcgccacgcccagctggacactgggtatattttttagcagctgttttctaacatccagtgttcagctttgtgggcatgaagagcttgttgctgaaacaacttcctgaatcagttgtgatgatggttcttgaagtccacagaccctgagcggcttctgattcttttatttttttctgagatggagtcttactctgttgcccaggctggagtgcagtggtgcgatctcagctcacactgcaacctccacttcctgggttcaagcgattctcctcaagcctcccgaatagctgggactacaggtgtgcgccaccatgcccagatttttttttttttatatttttagtagagacggggttttgccatgttgctaggctggtctggaactcctgacctcaagtgatccgtctgcctcggcctcccatagtgctgggattacaagtgtgggccactgtgcccagccactcctgattccttactctcctgatggtaccagagggcaagactcccaggtgggttgctcggcccctgtgttctgggagctattcctgcagtgcagcttgctcctctagccctcttgatcattttctaaggacagaatactgcatgaaattcctctctgcttacactagctagtgtggcttctgtttcttgcaggtgactgatgagaatgggtggggccagggtatagactggcctgagcagtgggaattttctgtggtgggcagtggagatacacggggagcctttaagcagggcaaggtcagggagggaatgacatgagcatatgtgtgccttagggaggttctgttgcttcagggaggtgctgagccccctgagaaggtagcagaggtgcagacttcactgctttctgggagtccctcttctttggggttaagacagacccaaaagattggagagagatgttctttgcctcaatggggcaggtcattgactttgagtgtttagcctcctgagcattctaggctttatttgcaacatgcaaatctaaaatgaatagcagggaggactttacagtacagaggatagtgagaattttggtaaccaaaaaccaggctcaggatcaagagagaacagagcaggtaaaagctcggcactggcgctctgggtgtctgaattcacacttagtctccattgccaatttactgtgatactccaggaaagagagttacccttttagggcctctgaagtccctctgagagggaggaaagttttcctcctcctgttgtgtaggaggggtgaggggcagtggcgagagaggtccttctttttccaggggaggagatgatgttctttccaatggggctgctctcaggtcttatgcttttggacctctgacccccctagctataaaatgcacatgcctggccgggcgcagtgtctcacacctgtaattccaatacttggggaggctgaggcaggtggatctgagcctcaggagtttgagaccagcctgggcaacatggtgaaacccttgtatctccttaaaaaaaaaattagctgggaacagtggtgcctgtctgtagtcccagctacttgggaggctgaggtgggaggatcacctgagcccaggtaggctgaggctgcagtgagccatgatggtgccactgcattccagcctgggtgacagagtgagaccctatttcaaaataataataataataataataataataataacaacacatgcctgaagctctagtcaatggcttgcctctgcagggcaggtaaagtccaattcaggaacatctttattatgaaggcttacatccaggtcagggtgaccccattcattctccaaccccagaatggagggcccctcaggcactgccgcatcctcagactcaaactctgttgttcacacatcccatcggtaaaaaatgttgagcaggcaacctaacaactatttgtttataaattacagatatataggccaggtgtggtggctcacgcctataatcccagcactttgggaaactgaggtgggtggatcacttgaggttaggagttcaagaccagtctggccaatatggtgaaaccccatctctactaaaaatataagaattagctggatgtggtggtgcacgcttgtaatcccagctacttgggagactgaggtgggaggatcacttgaacccaggaggtggaggttgcagtgagccaagatcatgccactgcactctagcctggatgacacagcgagactccatctcaaaaaaaaacccaaaaacattaggtacgtggaactttacaaattatatacatgagctatatatacataaatatattagtatttacattacaaaaatatatgtacattataaaatatgttatgctcattatacgtatatgtgtaaactatattatatacattctaaaattttaaataaagatgaagaaaaaatacattgaatctttttcaatgatatatttaaaagtaattttatggcatctcatttaattaaaacccttttgttctcacaatgagagcaacgtgattgaatatgcttgtttatttttgaaactcctggtttgtgaaatctgaaaacactttgtggaacagtgatttgaatgtctcattctaaattcagtttatttcaatattcagttttaatggttgtcacagctgaaaagaaggcctcacgaagatacctagatccagacggatggggtgcattgtgggctcagctcattaaatcatgacattaattttcaattttcaatttcatccaccaattatgcaaaggttttgttcaaaattggcttgcaaatttccatcttctctcatgtcaatcagttgttcttgcaaagaaattggaatatgttgcattataatactttcagcaaatggcttttaaacccactcaaactcttcatttagaagatttttaagcaaattaaacatttcttttttagttcgttgtttgaagggcagatatgaaggatcttgggaacacatgaggttttcagccacaaaatcatgtaacaataggaacactttcaaaccttattttcaaatgctctgtcatattcttttccttcccccacagttgcttccttgataacttggctgcacttcacctttatcctgatgaaaagagatttcatttttggaaatctctactgtagcactcaataggcaatacttgttcttcctttgtgatatggcaaatgaggcgatcttctactattttcttgctgtttctttgcagaaatctttttaggccgtttatcctttttttttttttgaaggagggctaatttagtttgaatcaggcagtataaactgggatatgcagacatcaatatgtcacaatacattgaaagtgagcaacagagtgagagtatagccctcaagttctctgcctgatggagtgactaattcaggggacataattggccaacaaacagactgagtgagggtgcctaggtcaatctgtatgttaaatattagttgacctgaatttatttatttatttatttttctctcttttcttttctttttttttttttttattttgagacggagtctcgctctgtcgcccaggctggagtgcagtggcgtgatctcggctcactgcaagctccgcctcccgtgttcacgccattctcctgcctcagcctcctgagtagctgggactacaggtgcccgccaccacgcctggctaattttttgtatttttaatagagacggggtttcaccgtgttagccaggatggtctcgatctcctgacctcgtgatccacccaccttggcctcccaaagtgttgggatcacaggcatgagccactgcaccctccctctttcttacttttagatacaaatacatgtatatgaattctaaaattttctttccacattccgcagtacttttggagtatgtatgtgcaacctcattggactgacaggtgagctgaggcttagtgtgggggttgcctatgggctccattgccaatggggtgataatgccagactgaaactcaggtccttgccttccacgatcctccctggaccctgacagtgtggatgtggaggtgatgcagggtagcctgtgcaagccccacccctgcatagggtcctgtggtcctaagaatacctgtctccctggactcagggccagaacctcaacatctgctctgctctgtgctctctggggagcagcaccgggtgagcccaagaacaggtgtggttctgattagaatgaccctttcttttcccactcccttccttcctcacgtcagagccaggcctctcagaccaagtctagatcaccgtgaccaggggtaagttatgtgggcctctcagaaccaaggaagttgttcttggctttgggacataatttgctgatttgtacacctcagttagatctgaaaagcaaatcagccatctgtgcccagaaacagataggcggggggctgggcactgccgtccttgggcttgccctcctggacctctcgctgtccttggaggaggggaagtgcagggctgctcttggaggcatcggtacctgtgcagcaatgacccaagctgctggaccgtctgtccagacgctggccaggagaagggcatccccggccagctcgtgtgcgatcctgcatggccctaggcccaaggtgagctcatgggatgagtcaagcctcctgctgagcctggcagctgagtaagaggacatgctgtgctctcacacctccctggccccaccgcggcatgcccacctttgtcttcccttctggggtttggcttgttgtcactgacaacatggggcagcccttttgcacacggcatccctggagccacgtgttaactgtgagttaataaatgggtgttgttttaagccactaaatctgtggtcattttttatatagaagtagaagatgaatacataccataagtctaaatattcaaaagtcataagtcaagcttacaaactgttaataaaatatgttctatccatctaccttgatttttttttaaaataatgactgtgaaggccagggtcaaaatcataattctctgacaactaggagttctgtgccaggaggtagctgcctggggagggctggcccctggatcccagtccctcgctggtggtctggtccttttaccttctcattcctggcttcatcctgcaccagaagttgggggacagaagagcctggagaagccaaattctaaccgctctccttcaaacagctatcccttgggcccagggtgtgacttgctttggggaaattaacctggagaagagtttcagggctgtatgggcaggaataccatggtcctccatgggcaatgcatggtctagaagggaggctgtggttctggtgacatccactcggacccacagattcttcattctatgggggtgaccagagcagaattcctctatagccggggacccaggccaagggcctttcattttgtccttttattgtagtaaaatatgtatgacatcaaattcaccattgtgaatttaatacattcacaatgttgtgcaaccaccacctctatttcggtccagaacatttttatagccccaaaaggaaactctatacctattaagcagtcactcccatctccctctcctccaggccctggcaaccactaatctgtattctgtctttatggctttacctattctggatagttgatataaatggagtcacacactatgcagccttttgtgtctggcttttttcacttagtataatgacttcaggttcctccatgctggagctcatttcagcagctcattcctttctaaggcagaataacattccattgcacggataaaccgtatgtccaggggcctttcctgccaggatcaaagatggtattgggctggggcttgggagaggtcagctggtgactttacctctttttctttttctcctccatgcctcttggggtttgtcactttagaatatgctgctgaggcttggggacccagggagacagcctgtctcaccatgtcccctagtctttgcaacctgatcctgaatcctgcctggcggtggcgacaacatcagacagagctggagctggtgtgaccccatcccaggaggatgctcctatttcggggatcccagctgtctctggtcagggtgcctcagcagagtctaggaaaagccaaagcccatctctggtgacagctctgaggtccgacagtggggagaggtggtgggtggggggaaggagttgggcttgctcaactgccgtgcctgtagggcggagggagtccatcctggcacggggcacagcaatcggacccaagcccaaagagatgcttagctcttcacttgtggagcctattttccagagaaatttaattccacattgttttttctctgctctgcagacgcctcggagttctgtgccaggaaccgagctgaggaactcagctgaggaaaccacgggaatctcatttgaagaggaatttggcccctggagccccctccccactcactggtgggagggtgccaagacttcagtcgccgccgccacaccagcaaaccccaaaccacaggaatgcaatggggtcacctggggacagagggagatggatggacagcgagtaggcagtgagcccttgggcctgcatcgcatggggtctgctattttgtgacaaaagcactggacttggtccccaggcctcggtgtggattcaggcctcggtgtggattcaggcttgccactcgggtcatggggtcttgggtggtcacgtctgtggctaaccacgctcacctggccactctggcctttggaccaactcgggcaaggagctgagcttgacggggagggaagccacggattggggtggacggaggcggtgagtgagagtagagtgttctggtctccaggctctgcaggctgagcaggggaggcacccagcacttgttacccagggaaaggaaactatgtcgataatgatttgtcagctatgggtcaaggactgctccaggcacttttttttttttgagacggagtctcgctctgtcaccctggctggagtgcagtggcgcaatctcggctcactgcaagctccgcctcccgggtttcacgccattctcctgcctcagcctcccgagtagctgagactgcaggtgcccgccaccatgcccggctaattttttaaatatttttagtagagacagggtttcaccgtgctagccaggatggtctcaatctcctgacctcgtgatccgctcgcctcggcctcccaaagtgctgggattacaggcgtgagccaccacgcctggcccgctccaggcactttatataatacattgcatttctccttacggtggtcctctggtgtggctggcatcattctcttttatagacaaggaaaccaagaaaggagaaggggactcccctagagtaacaggtaccaggggaggggctgggcagagggtggtcatccccgaatgctgagtgctccacaccatgccactggcccccgactcagtcctcagacttgttccttggtgagatcacagttgaaataatagttttcttccccttaactcctcctagttaagaaaggaatcatagtatttttgagctggaatggacttgggtacaagttaccattttacaaacgggaaaattgaggctcagagaggagaagcagcttttccatttgaatcttcaaatgagattcccgtggtttcctcagcggagtttctcagcttggttcctggcacagaattcctaggcgtctgcagagcagagaacaaacaatgtggaattaaactgccctgaaaaataggctcctcaagtgaagatctagaagaccttcctgacttttatcacccaggaagatagcagatctagctccagatgctctctggccatttgggccacatgggtagaatccagggtccctgaggccaaggctgtctttagtgcccagtgggacagaatctccttgctctgcccaggttccacacctgtctgttggtgtgaccctgcatccaacctgagaggccactgatggtttggtgcaccctgtccccactattataaccctgctgggagggttcaggagtgccatgttggtagatgaagcactgctctattttgtccctcaccttaacaggcacatgtcacctgtacttggtggctctatccagcagaaggagagaaggtgggaatgagtgtcatcgtggttcagacactgtccagtggggtcaccttagcttagtcacttcatatatggagggattcctgggagcaggctctgtgctaaggtgctggggaaacaaaaataaaataatgtccctgttctcaaggaggagctcacagtctagtggagaaggcagacctgcagtttaacgatggctatttcatgatgtccttgctctgccgaggaggaggtgagcagcacagtgggagcacggagggaatcaggacctccgtgctcccacttgctagaggaggcagggctgagatacaacgagaagggttatttgccaggtggacaaaagcagaggtcattgagtttagaaagtgggttcaggttgggtgcagtggtgcacatctgtagtcctagctacttgggaggctgaggtaggaggatcccttgagcccaggaatttgaggctgcaatgagctatgatggtgccactgcactcaagcctgggtgacagagtgagatcctgtctgaataaacaaacaaaaagcagcagactcagcaagtgcaaaggaatgaacatgtggcagggaaatgtggaataacttggaagagttggataatacaaagtggcatgttggcaatgatggtgcggggatgttaggctggcgaggcattgggaagcatgaaggatttcaagcaggggatggacacaaccagatctgtgtgttggaaagtctgcctgggctgccccacagagggcatgatgggggtggggaggacacctggaaagctgataccatgatctgggtgagatagggtggggtaggggagtcaccctaaggctgggcagtgagagaagtaacaggattgagggattgtgcttagctggtttgggcttgagtgactgggtaattgggggcaccatccatcccagtagggaaacaggaggtatgtaggtttaatggtgaggatggagatgcatatgcattaagtttgaggacctgatgatttgaggtgctcatgggacatccaaagtgagatgtctgagggagagctgatataaagatttggaggccaaataaaagttagggctgtagtttgatatttggggctcatcatcctacatcaaatacagatgagttaaggggccacagaatgctctggaagctgcacaggatgactttggtgccctgtgcatccaccgttggcattcgctgttcccctgcatgctgaggcttctgcctgcatccctgcagttctgccagaggccttctctgcagacagaagcaggctgtctgtcctgtgcatgggacaggttaggagtgttgtggagttgatgaccccaggagcagccttcagccagtgacagatgcgaactggatgatgaaaaccatctttacttcctgtaggtgtgttctgccatctctcaggggcttccagtgggattgcgtttgagttcccagttgcccacaggggcttgtcagtcctcctccattggcttcctccccctttctgtgtcactcttccatttccctacagtgcttcctgggatcacctgccaagtcaatgaatctcatgctcatccttgtctcagagtctgcttctggggaacccgttctaaaacactggtttccttcagtaggatgtgcgtctgcattgactgcttcctgtcttgattgcttcttcatgtttccagcatgtcttgactctcaactggcctggaagtggcttcagggtgttttcatctctgtgtctccagcaccaggatgccaggggaagggattcctcagcaagcggttgttggatatatgaatgaataaacccaccagtggcttctcattgcttttaggatcgagacccaactgttcaataagcttcacaaggctccttcccacctctccacctccacgtcccgccaccctcccccaccctctgatggtgcgtgtggcacatgccggtctctgcctgactgctccttcgccaagccatcctcttgacacagtactagttcacacctcctcccccatccttcccttagcactcctccatttcccactccccgcccccttctcagagaactcaggcatcctctctgcagcaaagatgtccctgaccaccgtccccagcccagaccagttggggccctactgttctaacctcctgtagcactctgtgtatttcttcatgctccctatcattgacttcggttatgaatttttttttttttttttgagacggagtttcgctcttgttgcccaggctggaatgcagtggcgcgatctcggctcactgcaacttccgcctcctgggttcaagcgattctcctacctcagcctcctgagtagctgggattaccggcatgcaccaccacgcctggctaatttttttttgtatttttagtagagatggggtttcaccatgttggtcaggcttgcctcgtactactgacctcaggtgatccacctgcctcggcctcccaaagtgctgggattacaggtgtgagccaccatgcccggccttggaattatttaaataatgcttagaatgatgtttctcaaacttttctgattatgaaccacaggaagaaatacattttatgccaggacccagttcacgtaatacatgtataactgaatgcttatcctcactgcttgggctacactaatattttctatcccattctgtattgcatttaaaaaaatgctggctgtgactcactaaatggactataggctggcagttgggaaaaaggtctagacaacaagatagatgcctgcaaattcaggagagtagggacttaattcacttgtactcactgctgtcccccagggcactgcacagtgtctggcacccagaaaggtgctcaatcaatatttgttgaatgaccatatgataggaacaaatatgtatgaatgagtgaatgaattgcctgccccacccagacaggaaactgtggcttctatcagattttgctgttaccgaaaaataccagcccacttcctgtggctttgatctgcagccttaattctaaactgccctgcctcagccaacagctatctgcagctcatttcctgctttctggccatcttatctctgtcttcaagcattcctcagctttctctttccaggtaagtatacccagagccccagttcttcctcttgcaactttggcagcacagggtggggctgcccttttgggccaagtactatcccagatctcaggctcctggggtgtggggcctttctgggtcaggcgtgtccttctgattccagcctcctggggggcaggtgctagggctgggcctgggcatcggtccacatcctgttgatggtctttgggacaggatgggggatgaggatggagggtagacattgatgaaataaccatgcagatgtctaattatggactgtgaaagaggctatgaaggaaaagtcaaggttgccttgagaatgtgtaacaagggacatgcctataggggatcacggagagctgcctcaattaatccaagatctgaatacaatagaagctagccaggcaaaaagggtaaaggagagagaaagaacttgcagatggaagagactgcaggtgcaaaggtcctggggtaggagtgagtgatagcggtcctgttgaggagctgaagaaaactcagtgcagctggtggacaaagacagaaggatttacaacaaggaggccagagaggcacctaggggccagccccagtgcaccagcttagaggttttggatttaccttgaaaacagtgggaagcaacagaacatttgtagaagcgtgatgacattgtgtttggtttttttaatttgtttttgtttatctatttttatttttatttatgtatttttgagacagggtctcgctctgtcgcccaggctggagtgcagtggtgctatctcagctcactgcaatctccacctcccgggttcaagaattctcctgcctcagcctcctgagtagctgggactacaggcacatgccaccatacccagctaatttttttgtatttttagtagagacggggcttcaccctgttagccaggatcgtctcaatctcctgacctcgtgatctgcccatctcggcctcctaaagtgctgggattacagcagtgagccacagtgcccggccctgttttggtttatttttgagacaaggtcttctctgtcacccatgctggagtgcagtggcacgatcatagctcactgtagccttgacctcctgggatccagcaatcctcccaagacattgtgttttgcaagatcctctggatgtggtatggctaaagggttggggagctgatcaagtgcagagggcaggagcctagggtggtggtggtggagatacaggcacatgactggctttgagaagtacagtacttagtaagtacagtccaatatagtccaatacagtagagttgaatttgtccattcaacagtgttaaacaccatgactctaaggaccagagagccaggctgggttctgcctttaggcagctctcagtcttctgggagtgcaagttggaggcagattggccaggctgaaaatgcaaagtgctcagggatgttcaaatagcaagcatgcctcctggagtgcatgcccagaggaagaaggagcaccttcagtgggtgctttcctgcaaatactgtttgagttccaggcagaagagaaaacagggtgctgggagaggattcattagggtctccttcctgactcctcaccatcatttataggacttttggctacagggatcttccctgcatttcaccggggcctatagtagggctgagagtgtgagagggaacaggggtctccccaagtgcctggggcagcgagccttgtaggtcaggtgagggtggcatccagactgggctctcactctcctcttcctgcctctgactcattttccttggaagtgcattcctctgtaaacctgattactcatggagtctccgccctccacctgcaggcctgcgcccttccctgaggtgtctcagtgagcaagcctgagcccccacccctatccctgcatccccatccccaagtagggcctgggtctcccccttggagtgggagctccctgagggcagggcaggtatgtttctttgcttggcgattagggctcctccaaggccttgaggagggtttctcacccacaggcttgttgccaaccaccctcccgccacccctctgcccctcaaagggctctgagggatcctcctgttatatggagtggcaggttgtgggatgggtttgtggggctcctgctgaggactgtctagagggcttcacaccctggctgtggggagtatacatagtccctgagggtgcttccccatcagagcccactctgtccatttcatccaaagagccccaggtcgtactctctgctgtgactggaaatggggccgggtttaagggactgctgggggctcatggaggtcagcttgtgctctccagcctggctttcctgactcccgagggcactgacagcagtgctgtctcctgacagcatctggctccctcctctgccccatgcctgggctcctgggtctgctttatagacccgcagcagaactgcacagagagggtaagagctgccttctagtcagcagaagttcagttggaaagagactctgctgaccagcaccagggcatcaggggcagccccatggttggtccccagggctgggagctcacagtcacctgctccagtccctgccttcctgccaaggggaggaccctctccaatgtgagctgggacctgaagcaggagcctttccttgctctggtctcactacactttggtgtccacccagcctcctaagatcacatcaaggggctcttgggagaataggacgcctgctccccccacctgccccctgcatcccagcactctcagactttggatggtgtagcacggaactgtagagctttaaaggaggcagcagagtttaggggaagagaaaaacggttgatctctaacaggcattctaagtggagtcctcgacagctgggagcagctccacaggcttcaaggtgtgggtgaagcaaaaagaccaactgagacccagggaagcaggaggggctatgggaagatcggagggcactgggggcagcctgtgcctttgagggcctcagaaatatcccatacacactcccttctggaaggactgaggaacaagctcttgggagtcgcatccaaactggtcagaaccggccgggtgtgatggctcacgcctgtaatcccagcactgtgggaggccgaggtgggcagatcacctgaggtcaggagttcgagaccagcctggccgacatggcgaaaacccgtctctactaaaaatgcaaaaattagccaggtgtggtggcatgcacctgtaatcccagctacttgggaggctgaggcaggagaatcacttgaacccaggaggcagaggttgcagtgagccgagagggcaccactgcactccagcctgggcgacagagtgagactccatatcaaagaaaaaaacaaaaaaacaaaaaaacaaattgggcagaaccactggggtaaaataggcaacaagctcagaaggtttacatatttggggggtgagggtcaggggaggtgtcccatggaggcggtctcaaagggaagccacgtgttgaatacttccagtaccaatagcagggtggggggatccaggagtagtgaagcagtgaatcccccagcccattcccaccccttactctggaacctcctcctaaaagtacaggaaaatccttatttaataacaatcaacagaacaggattatgaaccgacaccatacagaggtatttgtaagaaagaaggtggatgccggaatcctttcttcaaacagaagcttaccagtaagtgcagactaatacaacaggtaggtcaaggctaatccagttggagggggtgctggtggaggtgggcactgagggagggggtcagcaccctagccgtccagccctctccatcctcctgcacccgccacacctgggttctgtgcagcctgatgtgtccccaccccctcctatgcaatgaaggagggagacgcagagatggagggcggcttccccaagaccacccagggtactggtttgtggtggagcgggaagaggtcacgacgcctcctgcctagcactccctctcttaccccagcctgtctgttgccgcctgcatccctccattcacacagtgtcttctcctgccagacaccagcaggacacagcgggcaggacaggttcctctgggtctgcccgaaggactcaaagtccagggacaagagtcgcttggtggcctcaggaaggagagaaggaggcactgtttcggatgggccgggggaagtggaggtgggatgcagggctgtggagtcctcctggcagcctaggctgtgtgtggggcgtggcgggatgccagagggtctgtgttgaggcctagccctgtctcctctacagtggaggaactgctttgggactcagttttgttacttgtaaaatggggccacgctctgcccttccagcttcatgttgctgaagggaggctctaaggagacggaagcttcctgttcctgtaacaagatgccatgagcgaatcatactctcagcctggcccccaggagtctcctcccttcgggcttctggagttccctgctccactctgacccccagggagagtccccacgtatcctccccgctgtggagggtgcccttgcagtcctccctgagctgccccaggatgactggctccacagggaatgtcctcccactctgtaggaagtggagcatggctgagaagaactccctgtggtcaggtcacccccatccccagacgcacacagacacaaacacatacatatcctgaggtattgaagaagaattcaccacaccctgaagattgctttccacaaagcactctctccaagccctgagtcacccaactccttcactctggacaccctgccaggaacaaggatatttgtcctttcggcagacatgggttcaagtccctgctccactgctaactaatggcatggcctgggtcaagcattacttgctaatctcagttttttcataggtagaataaggataatagcatcaaccttatatgttggttgtgaggatcaagtgagataatgtgtgtgtggcaggaggaaagccatcggcgggggcgggtgggggtcgagtgttccatcccagtctctcccttctctctgctcatcagagaaaatcctgacttggcctatttgaattgtgtgtgtgtgtgtgtgtgtgtgtgtgtgtgtgtgtgtgtgtgtgtgtgcgcgcacgcctcccttaaccctctatgaaaggtgctgatttattggaatagtccttaggcataggcgatatagaactgggaggagagagagagagggaagaaggattagcagcaagactgagggaggagggaggtttgagcagctgtaatgggtgagggaagagagtgggtgggagaaaggagatttgagaagcatcgctatgatccatgaatctttgtagtcaagtttaagaaattcaagtaaacagagttattgtgaaattattattttttggttgctattctctctctcctctcccactctgtctctttttttttttctttgagatgggatcttgctctgtcgcctaggctggagtgacgcagtggtgagatcatagctcactgcagccaatttttttttgtagcaacagggtcttgttatattgcccagggtggtctcaaactcctggcttcaagtgatcttcctgccttagcctcccaaagtgctgggattacaggcatgagctactgcgcccagcctggttgccatccttgatgataacgcagctttgagactggaccatttgcatgacggccttataagtgatacccctaagtaacatgcttagcacacagtagggacacagtaggcacagtgactggtgctgtatcctctcaatttggatgacacttgtgtgcacatgtactgtctcccatattggactgggtgtttcctgagtgtgggttggatcacatcagcctgggagcgacttgaagcctgggactctattttgtttccctgccctcccaccccccgccatattagatgagaagctccttgaggacagggattcttcctgtcctgctttcttcattagacctgcaactcccagtgtgggtgatgctcttcctccttttggctctgctcgaggactgagaacaggatcctgctcacagactgtgtcttagacccacctgccttggcctcccagagtgctgggatcacaggcgtgagccaccgcacctggccatgatagcttggctttcatatctctgcctggcagtgggtttgggatcttcataatccagttcagcttgctgcaactcaattagactccaatacttattgattgcccactgtgtgctagctataggactgggtgcaggggaaatatgaggattccctttaaggaatccctctccaccagagggacaggtgtgtgcaaagctctctttgttgcagagagattggaactacagcaaaggtatgaacaggtgtcacggggacacagaagaaagagcagttactcttccggaaggttggagaagattttgtgaaggtggggatgtttgatttgaaccttgaagaacaagcagagacccaagaagtacagaagaggggaggtggaaatagcatgaacgaggtggggcatggtgagtagtctagtatggagtgggaaggaggaatagcaatgagcatttattgagcacctactaatcactggattctgtgctaggtgctctgcatatatattatctcacttaatcctcacagcaatctgagaaggtaggtactgatgtgggaactaacatttggagagaacagatggttgaaccaggatttgaatcaggtttgtttgactccaaactccatgctcttttttttttaatcatgccagtggttttcccagtatattctacaaaatttttagggttctgaggaggtgctttagggacacgtataattttagtttcgtatttaaaatatattataatcaacagacactgaaatgtgttatgtaacaaaaaaaagctttccttccatctctgtgcatatttttgagtttcttgtaaatgtgtcattgattagaaggactgcacagtctgctcaggtctgtctatgtaaaagcacacacccatgcccaccagccttcattacaaggtcagtgggacttccaatccaagagggttgactaaatgcacatgggcttatctttacctcttccagaaatgtctttgtaataaataataaacatatcaatgcttccaaaggagaatttgaattgggagggggcacctgtggacaagagaaatcccaacaaatttctggagaagtggttcgatggggaaggatgactgagtaagcaggacagaggaagctgctgtgtggaatgcacatggctgggtttgcagccaaagagggagctgacccaccagcagaggcacagagaagctcaggacttggatgtgctaggtgcaatggagggtgggaaagggatatgtggctgaaaagggggagcttaattggaagtctaaaaatggaacagttaaatccctgactcttatatgcaaactgttcagccagcagatgtttgctttgtcccccattttgctccttcccctaatttcttctttaaagaaattaaattgcctgaggaagactaggatagctgggttttaaggtggcatctgagaacaaagcacattgcaggctgacatttagaaatctcaaggcataaagatcagtttacgtggaaacaaagcctgccattcatctcctcttatccatgtacacagagcttccaggaaagttttctactgcttcattcttaaatatgaatggacaaccataagccagaagctatttgaggaagcctgaaatatgaaatagagagactaagataagcaaagtgaaaataagacctctgaggaaacaaagacaattcatacgtagaatagaacttaaaaaaagaattcaagaagacactgaatctataaaacatgagtagtgatatgaaaagagaaacaattagagaacacaaaagccccagacatagaaaaatgtaattaaaattcattggaaatgttgaaagttaaggtcaaggtaatctctcagaaaataaagcaaaaggttaaagaaacagaattttattagataatatatgagacataaaaaattaatacaggaggtccatgtttgatttataaagatttcagagagaagggagaaatcaagggagagaattttcaaataaatgactgaacagaattttttagacaaaacactccagtcttcagaataacaggattcatcaggcaagcccccagcaaaaaaaaaaaaacacacaagatttagaaatttcagaatacttgggaaaataagaagatgctaaaagtttccagagagaaaaaaatcacctataaaggaatgaaaatcggaaagtcaccagacttctcactagcagcattggatgacaaaagacaatgatgcaatctcttccaagttctgagagagagattttcaacttagaattcaatacctagctaaactgtctactggttaagagggcaaatcaaagacactttaagatacatgaggactgaggaagtttacttcctatagactccttgtggtaatgctcctagaaaaaaagacagcaatagaggatgtgcagcagtaaaacaaaggagaaaccaagaatgagaaaagcatggaatttttgtcagcttataagttagcttggtatgtagttttaattaatttgtttatttagtgtgtgttttctgttattgggtttaggtatcagggttatgctagctttgtaagatgaactgagttttctacgtttttattctctgaaagtgtttgcacagggaataatctccttcttgaatgtttgcaaaaacaattgtccacatctttttttaaaaaacactttttggacaatattttctattttctttcaccattttgtgccttttgtggaggtcattctgctacccaatattcagtcttcttcctttattgaaaagaatccaattttgccaagttcaaagttcaatttcatggactccctttcagagagtggggcaagtgacacagttttggcccatgagatgaaaacacacatttactgaatagagtttctggaaaagctatcagtttcctgataaaaagggacagacttagctgtccctttgtcctccctgccttgtctggaatgtagacaggatgcctagacgtggaggagcaatcttaaaagtgtgaagacaaaagccactttctaaggatggtggagcagaaaggcaggagtcctgctccctggcaccatcatggagcatgcccagcccagatctgcccccctctgaatttcctgttgcattagaaaaatatgtccctttttagtttaagttactgatctcaattttctgttatttgcagcaaattcactttcaattgatacaatctttcacgtcagagctgcttcttgtaacacagaagttttcagattctatgaaaaggtattgaatgaattgaaggctctgttaagggggcaactatctcccctccccattctcctatcagcccataaaacaggaactgacaacctcttggaagaattgggaaggaacttttcgattttctctgtacaatcttcactggttcctctctgtgagaggaggagggacctcttggattggtgtcgttgggaaaagggtatcaagtgtgcatggctcagcctgttcctggctctctctctgggactgacctgactgcaagcagcatgttctctgtctgctcctgcctcctccaggcaatgagcaccagggcgggtccagcccttgcttgggaggacttcaatagtccagctgctctgccgcgagtgggtgagtgagttcaagtcagaggagaagacacagaaagctcatttgggccttgggtcttagccacatcctccagtccatctggactagcaataaagctgacattttaatccctacttgtctcctgtgactatttctcaattggatcagacctcggagaagtgagggatgtgattaactagcacccgcaaaccccaacatctgttgaatatttagccccagcgggaaaagccaaagttagatgaaaacactggtttaaaattctgataattattagacaatacttctctatccttgtttgtatgtcttttgatcttactataaaatgtgtatcatgtgggtttaaaaaaatttttttaaattttctttttgaaggtaagagcctggattgagagtgataaggctcttctgagtcttggctaccacttactcactctgtcccttgacttctctgggcttcaattttaccaattatataaaatgaggaggttagactagatgatccatgagggccatcccaagcttcggtgttctttcattcatttgacccctttttattgagtatgtgttgagtgtgtgctggcagctggctctgtgatgtacaaaacaaacctggcccctgccatttggggtttagagtctcatagaaaagacagacatcaaacacaccacaaataagtggacaattacaaatatttcacttgtttagccattaaatgttcctaagtggtcatttggattgtgaagattcctacttcttctcagttatccacactcagggcaaaccttgcagggtccagcagtcacacacagtggtgccactactgcagctgtgtcccagccatcgctctcgggaagacaacaaagaggcttccaaagggctggccttttggattaaaaaaaaagttaagcattttttaaaaagtcacaaatgagtaacatgcttgttataaaaatttaagcaataaagaaaaaaaaattgaaaggaaaaaatctttctcttgtcccctccaagcccacttggaaaaagaaataatgggtagatgtgtgtccttccattaagctgcatatttaactgcaggctctaggagggcagggatggcgtctgccttacccactgctgtatccctggtgggtgcccaggaaatacttgctgattgaactagtgcataagtagtaatcacacataaaggctcatagatagctatttttttaaagattgaaaaggaaatcatgccacatatgttttttttcttgcaccttccttgtttttttttttttttcactcaaaaatctgtcatggaatccctccatgtattggttcctaatttacccattcctcttgtgctgggttgaattgtatcgccctcaaaagctacactgaagtcctaatcccaggtcaggcactgtggctcacacctgtcatccccagcaccctgggaggctgaggcaggtggatgacctgaggtcaggagatcgagaacagcctggccgacatggtgaaaccctgtctctactaaaaatacaaaaattagttgggcatggtggtgggtgcctataatcctagctactcaggaggctaaggcaggagaatcacttgaaccagtgagctgagatcatgccactgcattccagcctgggcgacagagtgagatcctgtttcaaaaaaaaaaaaaaagaagtcataggtacctaatccctggtacctatgaatgttaccttatttggaaatagggtatttgcagacatgatcaagttaagatgaggccatgctcgattagggtgggtcctaatccaatatagctggtgcctttataaaaagagacagagactgcagccataaaaaagaatgggtttatgtcttttgcagggacatggatgaagctggaagccatcattctcagcaaactaacacaggaacagaaaaccaaacaccgcatgttctcactcgtaagtgggagttgaacaatgagaacacatggacacagggaggggaacatcacacaccagggcttgacaggggttgaagggcaaggggattgagagcattaggacaaatacctaatgcatgtggggcttcaaacctacgtgacaggttcatagatgcagcaaaccaccatggcacatatatacctatgtaacaaacttgcacgttctgcacatgtatcttaaagtaaaaaaaaaaaaaaacttaaagtaaaaaaaaaaaaaagagtgagcgtgagacagaaacagagacacagggaggatgtcacacaatgacagaggaaagattggtgtgatgcagctgcaagccaagaagcgctgagggcggatagtcgcccgtcagaatctagaagaggcaaggaaggagttttcccagagccttggagggaacagaaccctgccgacaccttgatttgggacttctggtctccagattgcaagacaatccatttctgttgttttaagccactcagtttgtggcagttgattacagcagccctaggaaatgaatccctgcctcttcaggtgtatttaggttgcttccagtgttgaactatcataacaatgaaaactgcttccatggactgtttggagaggggagccctaggaggttttttttttttttgagaaagggtctcactctgttgcccaggctggaatgcagtggcgtaatcttggctcactgcaacctctgcctcctgggttcgagcaattcttgtgccttagccacctaagtagctgagactaacaggcgtgtgccaccatgcccagctaatttttgtatgtttagtaaagttggggttctgccatgttggccaggctggtcttgaactcctgacctcaagtgatctgcctgcctcagcctcccaaagtgctgggattacaggcgtgagtcactgtgtccagtcccccctttttttttgagattgggtctcactctgttgcccaggctggggtgcagtggtgtgatcatgactcactgcagcctcaacctcccaaactcaagggttcctcctacctcagccttctgagtaactgggactacaggtgtgtaccaccatgcctggctaactttttttttttttttgtaaagacagggttttgccatgttgcccaggctggtttcgaactcctagcctcaagtgatcctcccaccttggccttccaaagtgctgggattataggtgtgagccactgtgcctggccctgagtttattcttgtctccaggaaacccttggaataatcatagaccctagccttggggccttagcatcaactcataaccttggcaggattgccagctaaaatatgggacacctgagtcatatttgggacatacttatgttacaaaagtatttgttttttatttgaaattccagtttaacagggcttctgtgtttttctttggtaaacctgacaaccctaaacctcaatctccgccattgtaatcctgagcagttgggctgtgagcagcctacactatcccagaaagagcctgagggtcatggttttctgcctggtgactgtaggagcactggaagatctcccctcgtcctggatctctgactgtcttttagcatcctgagtgttctcagtgggacctggatgtcctgtggcacctgcctcccccaacagtgcccagctaagcttctcttctgcccatctcagcagcaaagtgctcattcgctccaccccacctttgccttggcagtgcctgtccatctccctccagcctgctctccccctacctactcacccctactgggcttaggcaagacacatgtgggcctggcccgcaggggtccacagggcagaactaactcatcagctctaggtgtgctgagtggaactggagagggaagggtgccatgtgagcttgtgaagacggtgggcagtgcctcccaaacttgccctattgtaaaaattgcctaagggctggttggaaatgctattcctggttggaatcagagatctcctgggaggggaatcacagtagctcagggacctggccgagactggaggcttgggggtggccccctgcaaggaagcgctgtccaagcagaggtctgaaggctcagtaggagtcaggcaggtgaggctttggggggcagggtggggatccaggagaggaaagagcatagcaaatgccttgatgggagaagaagagcctggcctgtctgaggccagagaagaggccactgtggttagcgtgtggagagcgaacagaaaggcgagttgagcttggagaaagcaggcggagccacatctggccaggccttgttgggctggttaagaattcagcctaaagcaatggtaatggcctggggcaggcaccaactgaacctttttcaaaggcgagtcctgagttgcctccctcctctgatgtttgatctctgaaggtgcccatgttgcctccatcctgccacccaccccacccccaatctggcaaaaagccactcactcacccagcagggactttccactaagtctggtgggggcgggggaccagggggaccagggggctgttgcttgagagaaatgggtgtgggcatttaccaacggatttagaaagtttccatattagacaagtaacttgagaaaatactgtttttgttattgagaagatgctataaatgttcaagtatgtggtaggcataccacgcgtccttgtgtaatcccctcccctgagtgtaggctggacctggtgacttgctcctaatgagtaaaatatggtaaaagtgggggaatgtcacttttgagattagactatacaaaactgggactcccctcctgctcacactcttcgagacttctttcttatgtgttctgatgaagcagctgccatgttggaggctgccccatggaacggccaacgtgctgaggaacagagggcacaggcagtgaagggcatcggggccttgaatccagtggtccacgaggaactgaatcctgccagcaaccactcgagtaagcttggtattgggtccccaattgagccttgagatgactccagctcagctgacagcttgactgcagcctgcagaggtgctgaagtggaggactcagctaagctgcacctggatctgtgacccacagaaactgtgagatgataaaagttgttgtttcaagacactgagctttagggtactttattatgcatcaagaggcaactagtacaaagtataatttggaggagaccagccatacctgtaccctccttaagtatacatttgtataagttgaaatcatggtgggtgcactaattttgaagtcttaaaaaatcacttatcattatgggggagatatcattcatcagggtccatggtctgtgtatgtatcagagtctggccagaaaacagaaaccacaccaggtatcttaacaaaatttaatatgatgaattagatggcttaataacaagtacagtgtgaaaggtgaaaatcatcaataaccaatcatcaaaatcactctcagaaaatgtcatacatcatcaggacctgtggccttggaaactcaaaagccaagaattattgagcttattgtgtttgttgcatttaagcttctcttctgttcctttgtggtgtcagaggctgagtttattttgaacatgaacagagagacttctctctccttgacaagcgtgatttgttgaattagctagttaggtgggagtgtagtggtgatacactgtgtagtagaagcattctccatgtttccattccccatcacagtcacacagctgtggatttccaggcctgattgtccattgtgttgatgtcccagtttattaaaccacttccttattgtggttcccagtttttgacctttaaagaaagacttcaatgcacacatgtatgcagataacacttggcttcgtttggataatttccttggaataatttcccagggaaagagattactgggtcaaagggggaggaagagcttcatgccttttgctggtaattgctttactgctttccaaaggcactataccaacccagcatcgacagtttatagtggatgaggggtcagcttcagggcaccaagttattcactcttaggaaatcagcttccaggtccttcatcaaccacccaaaagggcctgtagatgtgagaagtggagtccagcacagagaatcccgggctgagaagtaggatgtctgaaagtccagcctcgaggcagcagagtgagcagttaacagtatgacctatggacaacagatcctgagttcgaattctgccttcaccactaagtgaccctgggcaagttacttaatttttctaagtcattagttttttcatctataaagcaggaattatagcaacactaagccttgaggaggtgagaggaagattaaacgagtcatgacatgtgaagtgcttagaccagggactagcacttggtaaatatgtagagtgagtggtattaccatttctattattcagacggagactccatctccatcagccctgcttctgtagtggctgaccacctcctcttctgggtttccacgtgagaccccaccctggttcttcagtttttcctgggatctcgtctctctgagaccaagaagcagtcttagctttgagatattgagttggatggtccttgaatgcccccttgtggacagctggctttctttcactctttcagctgaagaggaaaactggctgtgtgtgtgtgtgtgtgtgtgtgtgtgtgtgtgtgtgtgtgtgtgtctcggggtggggaagaaggtgggggaggcctccatgtttgcagacaaaacaggaaatagcacgtcatggcatctttcttgccggctaggaaggcatgggtgtatgggtctctgtacacttacataaacatggaggggagctgcatgtgctggtgtgcaggtgtgtatgtgggcatacacttgataccactctccttgttactggggtctctcactgggttctactgagacgatgtgattaatgtgatttgaaaaatgaaagccctgtgcacacacgaggacattgttatgtagaatagcttgtataaccattcggttgatcctttcactgatttggacattcagtcccacagttgtttattgagtacttactatgtaccgggtctcctgaggtctggggaggctacagtgaccaagacagaatctgtttccatcctctcacaatccagtgggtgagacagacaggtgagtaaacctgtggcgtgctagtccagcacttggtaaatattcagtaaatatgaagagtgagtgtttttaccatattcccagaggaggggcagagcggctgtggagggggaaggaaggctgcctggaggaggtgacatctgagctgagctatgaactgtgagtgatctatcctctccctggctttggggcagagggcttggtacaaaaagcattagtggggttttggaagtgcaggctgtaaccccaactccctgagcaagtccttttttttgggccggagtttcctcctggactaagtcaggggatttggccatgaaagccacagtttccatcaactttgatgttttctgaccttttattccctcagcctgaggaattcccatttcttccactggtctttcatgccccatcctcttccctaaagaaatgaaaaccagactgagtgataaaaagcagtgagacattggtatacacatgtaggacacacacacacactctcacacacacacactttctcacactctctctcacacacacacacacactcacacacacacacacacagacacacacactcctctattcccgccctacccctgctctgctggaaacctcgagctgcctcccaggtcagagtggtctgacaagggaggggtggagtgcagaggcagagtggaggtgagagctcagcagacccagtttcttttatgcttggccactcaggcaggtcaccttggggaggttactgagcttcccagagcctgcttccagctcagcaaagtacatacccacctggcagggcttccgtgatgattagagctgctatatgcgaaatgcgccccccggactctgtgtaggacctagcaggctctcggaaaatgggagctgaaaagtaatgatattacaaaatatctagtgtggtggctcacacctgtaatgccagtactttgggcagctaaggcgggcagatcacttcaggtcaggagttcaagaccagcctggtcaacatggtgaaaccccatctctactaaaaatacaaaaaaattagccaggcgtggtggcgggggcctgtaatcccagctatttgggaggctgaagcaggagaattgtttgaatccgggaggctgaggttcgcagtgagttgagatcgtgccactgcactccggcctgggcgacagaatgagacttcgtctagaaaaaaaaaaaaaatctagtgtgggtcagactcttgtgtctgcaggagggaaaggtgtgatctttcttccactctgatcttcacagtgagaatggtctggggaggatagcagacatgtgccaagctcactgtaggtggtgaggcactctggttccagtttagaatgcaatttattacttgggtcactttggccgagttatttaacctttctaagcctcagttttctcatctataaagcaggtactttaaaatagctcccttgtggaagtactgtgaggattaagtgagataataaatgtaaaaacacttcatgtagttcctggtatatagtaagtgctccataaattgatagctacctgtattggtcaggatatgctaactggtgtaacaaatagacccaagaatgtgtgatggcttagagacaatggaatcttgtttcttgcccctctaatggtctaagaaaataccaggttagcagtgaggctcaactagagaccaggtttctgacagctctgccgtttttttttttattttgagacggagttttgctctgttgcccaggctggagtgccgtggtgcaatctcggctcattgcaacctccacctcccgggttcaaatggttctcctgcctcagcctctcgagtagctgagactacaggtgtgtgcctggctaattagctctgccatctttaacaggtatcttctgaaatcactttggccatcggcttctagctagtgggtggggaagagagagtggagaaggcacatcagcttcttaactgctttggcccagaagtgccacttcagctcacattccatgggtgagaactaagtcacatggccccatcttaatgccacgggggctgggaaatacagtcactgactgggcagtgtcagatctcagtgtcaactccatatacttctcaatgtcaaccccacgcactaggcaaggggaagcaggagtctttggtgacagaaatgtctattcccatgattgttgttgctatttccatccaggacagagtgataagccctggatgggggggtgaaagcatagtaggagtttaaaaagtggggtgatcggggattgagctgattggggatccagcagtgctgcccagggaagacagcgtccagggggcttggagagaggcaggagttccacagggtgggatggagagagcagggagggaaggtcactgtgagctgagggagtcacatgaacggtcaagaggcaggaaaatccaggccaagagagagtccaaggcgggaaggggtggagaggtgtgctggcagcccacccggaaggcctggaacgtcaagataagggtgtggagacgcggagtcacgcatggtctctctgcagcatagtccaggggagtgggtggttgtgggataagagtgccaggtggggaggaggaggtgaggagggagaaagagaaagcagttaggggaggaaagtctggggttcacagaggagaggctggaaggtgtaggaggaaagggggcttgcctgaccccatgctcatccttctccctgaggctctccagctcctctggggccccagttgtcacctggcagcctccttcctggaggtccacccccttgggccccattgctccatccacaggcagaggcttgatctcctctttctgctttgttctccttccaggaaggaagtggctccagatgccgtgggtgggacattccttggctctgctcgctgttcccagatttctcatgattcccggcgacagagctggcatctctaatcagcctcagagaggggcagagtcttgctcaagaacaccttgcacctcaggaagccagaggctctttttgagctgtctcagccctctgagtgcaagacccacctccagagagatgctttggcaaggtgattcccccccaggtctgctgggcacctaccgtgtaccctgcaccgtgacgggcaccaggagacaagacggcttctacactcaggagcttatcatagattgggggaatgagatattacttagagaactataaaccctgggaagtaccacaaaagaggcacagacctatggggaaccaaagaaaggaggattcatgttaaaatattactgggggcggggcctggtggctcacacctgtaatcccagctctttgggaggctgaggcgggcggatcacctgaggccaggagttcgagaccagcctggccaacatggtgaaaccctgtctgtactaaaagtacaagaattagccggacgtggtggcaggtgcctgtaatcccagctactcaggaggctgaggcaggagaatcgcttgaatgggaggcggaggtggcagtgagctaagatcgtgccactgcactccagcctgggtgacaagagtgagactgcatctcaaaaaaaaaaaaattactaggaggaagtgacatttgtgatggttcatgaagaaggcataagatctgacaggtgaagatggctgggaggttatttcagggagaagggagagcccacgcaaaggtggaggaaagaagtcgggtgtgggggctacgcctgtaatcccagcacttttggaggctcaggcaggcggatcacctgacgtcaggagttcgagaccagcctgaccaatgtggtgaaactctgtctttattaaatacaaaaatttagctaggcatggtggcatatgcctgttaattccagttacttgggaggctgaggcaggagaatcgggaggcggaggttgcagtgagccgagattgcgccactgcactctagcctggtcaataagaacgaaattccatctcaaaaaaaaaaaaaaagaatcaaatcaggttcacctttaaagggaagtatcaggccagagttgagggagagccacaagcctgggcttgcctctcagcttctgactgtgggtcctgggcacattggtaaaccgttctgggccttggtttcctcaacgtgacgtggaatagcagcacccaccgctcatggtaaatggaatagctgctctggcttatttatagttgtgtttaacaaatagtttttcacttggagtgggtgggggcagggggagaggatcagtgaatcggtgccactggtggttcagcctggagggtggctgtggctgcctgtcccttttcatcttgtgcctgaaatgtttgggggaagaaggtcagtggtggctggaagcactaccgccttctcaggcctagctggctccatcccctgccctcatgctcacctggagggacggttatgggactgaggtctgtgtcattctggccactgtcatgtcataagctgctccaatcaggctggcaggagctctgcagcactagaggctgtgggctcctgggagtggaatgtgaatgcctgggaggccggcagccttgggccccatgcccacactggcacagccactcggtccagaagaggggcaggaatccaggtcaccagccgctgcgacacaggctggcttgccgtcccctttcctttggttaatcttccctatgaggagagacagagaggaagagtctacaggatacagctcattttgccagttttttcccaaagtccatcaggagggacgtgtctgagctgcccacttccttcggccagccttggaatgagagcacatgactcatggcctcacttctctagacctggaaggtagtgggagaatcagacagatcttggttctaatcctggctctgccacttattaactaggtaaccttgtgcacgttattaacctcttccagcctcagtttccttgattgtaaaatgggaataataacaccaactcacagtgttatgagaactggatgagctaatggttagagttaacatagtgaccaacacatattgggagcccttaaatatcagtttcctccctcccttccttccttccttccttccttccttccttccttccttccttccttccttccttccctccttccttccttccttccttccttccctccttccttccttccttccctccttccctccttctctccttccttccttctatctggggaatatgatggctgccttgagggcagagatctgagttgagagagctgtacgtacttagaggtggcctccttcatcatagaacccctcagaatcccaggccagaagactggagaacaacaggaaataggtgatctccaagcttcccacgctggctgtacccaatagctgatgagatttatctgaggcaccactattgttaaaaggaatgtagtgatctgagccccaggtgcagaaccctagcatagcgatgggagcgattacagcactcaccacctctggggagagtctgctctggcaccccttgctttagggcccaggtgaggctgagacaagcaagtgtggctacgtagggtagcatgggagaggtggaaatagctggactgggcttttcccctctggaggaccagtatctcctatcaaaacttaacagtatggatgccccagccactctctgccagccaattgacaaacagccagcagctaattcacactaaaatgttaatagcaataaaggaatcaatggtattcacaccctgggggtgttgatagctgttaatggctgtcaggttctacacatggccttctcagcagcaccactctcctctctgaagcgcctgtggctcagctggagagctgactgctgcagagtatagaggcccacgttttggctctagtctgtggctgggaatctaacccaggggacacaagccaaagtacaggaggcaggcagaactggagtacagggtcaccttggtgaccaccgtcagctcctagagcgcaggtgagccagttggccttataagcttaggtcagataagatgagaccaagcgtgtggcccaccaccgccccttgcttcaagaaaggcaaggtctggaaggtggaggagaggtggcatctggggcagagtagagcatggaggtcctccgtgcacagaggagcaaagctgttgccccctgctcttcttcaacgtgggcagctaggacctaagctcagcaccacatcaacctcatctgacacgtggctggaggaacagggcagtggtggctgtggtgggttggccacagcctctcttgggcatggctgaccagctctttgggcataatgtagctcttaggaggcctaggcccaggctgagcccagcgtgggggagtagggagtctcaaacctattgggctaaaaatcagctgagggcattgttaagatgcaggttcagattccttaggtctggggcctgaggctctggtttttcacaagctcctgggtggtgctgaggctgcgggttcaggtcatactctgagcagtgagtgtggatgcctgggagtgagaggctgagcaaaacactttcctggctgtgaccttcgtgtcccttccggctgtgacactttgtacatcgccaagaccacaagttgagtgggtggttggggcgcggagctcctgcactcagttgccccactggcggaggaaggtggctgccctttgatgtgatgaaaaataagaacagtcgccaaccattgagaacttactctgaggacacctcatcacttgtatgtggcagaacatggccctgagatgtttttgaggcttggaggaccctgagttatgagaaagtttagggaggggaagcactggtttatttgggaattattcccatcccaggtctctctggctcttttgagggtcaagggtcttatcaatccctttctcagtgcccagcacaatgccaagagttcagggagaaagcagataccccacagagacctagacaggccagaggcactgtccctgggcaggggaggcaggtcaggccggcggtgctcacccagggaggctccaggaactcaactcgggcctctgatcaaccgcagataaacactgaactttctacctgaggaagctccctggcagggctgggttcctgtcaaggagacagagaaagtttccattgagtgggggtgtgtgcatgcgtgcgtgtgtgtgtgtgtgcatgtgtgcgagtgtacgcgtgtgaatgcatgagtgtgtgcgtgcatgtctgtgtgcatgcatgtatgtgtgtgcatgtgtgtgtgtgtctgtgtttgtgtgtgtgtgcatgcgaacatgcaccgaggtgccctattatcttttcctctctgcagaaaatcaggtcagtggtttgactgttgttgttaaccgcaaggtggagtggggaggtggcctgagatgctgaggctgggctagagtatgagggccagggtatggggccaccaggctacagggcccccaggaagcagtggcaatggatgccagtctggggagagggtgctgcctgccatgtcctgtttccctcctagcattactctccctttctttagggccttggctgcctgtcctggtagccgctgttgaataacccagggactgtggctgaagagaggcagtcactctgccttgtggctcgggacacggtggaggggtgggaggtgcgggcagggcccccccatgggtagtagtaacaacagccaggctctggcagtcgcactttcacaccggagtcctcacctcgcccacagtgccctggaagcatgagagcaggtgttattgttgagggcactgagaaagagagagagaggggccaaagagctagttcaaaggcatcccggttctcactctggcctcagactccccttctggggtccttgagggcccctaggccaccccgaggggttggaggaacactttgtccattccccgtggcagatggaaggactccggagcatgtcagctgcagcctgggcctctgttgggtcctcggctctgggtctctcacaggcggccatcaaggtgttggctggggccttggtcatctcaaggctggagcaggaaaggacctgcctccccaggccctaagcttgaatggtgctggggacagggggcagcactcttctggcacggcagcccctcctccgtcctcttggcatcttgtccttaaagttcatcgttgcctcgtccgctaacctcctccccctcctttccgcctccatctccccaagtccttctcgcctctgcttttgcttccacggctgtttcctcacggaggctcagacaatagaggctaatgatccaactgctgagagcacaccctcctctagcagccagaaatcatctgttacccatcgcccgccctccctggggcccaggcttccagactgagaccttttccttccctcccacttcttactggaaatgagcccccgtccttccactcccccctaaccccccaggcctcccttagggaggttcaaggactcgtctctgactccacctatctactgggtacccctctgcaggggggaggcaggggctggtgcccacgaactctggaggcccttctgggagcacagtcttgccatgacctctctaggtcagctcagctccctgtgctggacacagacccggagaacagctcagcacgaggttaccaggctgacgttgcacagactgtgctggaaattacagagtgccttggagggaaaaacaaactggggtttcagttcccatggaaacgacatctatttgcagaggtgcttgcgtcagagcccgggaccctgtgcttggcagggatggggtggatgttaaaaggcagggtcatctgttgactgtctgggactcttccaggacagtgtctgaaatggggcccttacctttagccatgacaaacagctctttccacagaggggcctgtctgcctgggcatgtctctgcaatgctggggtttttgggtagattttaaacttatgagtcaagggtgtgggaagaccccacattcgccattcatgagcatttattccacgagcatgttttgacctatgatgtgccaggcactgggctaggccagccaatcaggagttggtctggacctgctaagtttggggcctaaagtctcccttcctgggaggagctttggtcagacaggggcaaagtggggacctgccagggaccacgtgacgtgggagcacacaggctcagcaatgccagtcccctcactctgtaaccaaagcaaatgccttctgtcctcgtgtgtcacaggggagtaattcctcatctcacggggaaagatgacccctaaactagccactgaggtccccacagcagaggcgattattccagctattgttatggaagagtgtctattgttaccctctctatcactttacactttacgaagagctgtacatccactacctcgtttaatgtaacactccagggaggttttaacaacatcacacctgttttcaaacggggaaactgcatcgagggaggagaaggcacttgtcaaggtcacacggatgataaacggtgagaccagtatgggaatctgaatgccggaccccctgctttgccccctcctccctgtcctggggcacctggtgaccagacctcccaccctggcaggcctccaaccagcccggctgtttcccacgcctggggaatgggaaccagctgtgtgctagtgcggtggggcatggattgttctggatctggtctcatggagactgcacatcagaaagaccacaaccctcaactctgctgctcacccaagtcacttcactcttccttgactcagtttccctctcagtaagttgacagaaagcctgtgaggggatctgagtgacttatgtcctataagaaatctgaagaaataggccgggcgcagtggctcacgcctgtaatctcagcaccttgggaggctgaggtgggcggatcatgaggtcaggagtttgacagcagcctgggcaacatggtgaaaccctgtatctactaaaaatacaaaaattagctggatgtggtggtgcgtgcctgtagtcccagctacttgggaggctgaggcaagagaatcacttgaatccgggaggcagaggttgcagtgagccgagatcgcgccactgcactccagcctgggtgacggggtgagactccgtctcaaacagacaaacaaaaaagaaatctgatgaaatagtttcttgttggtggccacttggacgacctttcctctctcctgtgggtgactgtaattggaatggggcacactggcatgccccttagggcccattcgtttttcccgaatcactctttaagaatctggtatcacctaacagaatgatggggttttcagggaagggacagaggctgggacaattttaaatagggatgcctgtaatcccagcactttgggaggccgaggtgagcggatcactagaggtcaggagttcgagaccagcctggctaacacagtgaaaccccgtctctactaaaaatacaaaaaattagctgggcatattggcgggcgcctgtagtcccagctactcgggcgcctgaggcaggagaatggcgtgaacccgggtggcggagcttgcagtgagccgagatcgtgccactgcactccagcctgggcgactgagcgagactctgtcaaaaaaaagaaaaaaaaaaaagcaaagattagctgggcgtgatggcgcatgcctgtaatcccagctactcgggaggctgaggcaggagagtcacttgaacctgggaggcagaggttgcagtgagccagtgcactccagccttagcgacagagcaagactctgtctctaaataaataaataaataaataaataaataaataaattaggaaggttagggttgggggtggagaatacaggttgggggtaaagaatagaggaggaggccaggcgcggtggctcacacctgtaatcccagcactttgggaggccgaggcgggcagatcatgaggtcaggagatcgagaccatcctggctaacgcggtgaaaccctgtctctacttaaaatacaaaaaattagccgggcatggtggtgggtgcctgtagtcccagctactcaggaggctgagccaggataatggcatgaaccctggaggcggaggttgtggtgagccgagatcgcgccattgcccagcctgggcaacaagagtgaaactccgtctcaaaaaaaaaaaaaaaaaaaaaaaaaagaatagaggaggaagaaaaatttccaggccttggagtcctgcttggtttgggtagggggtggggcaggatggggctgcaggatcctgaaggtccctgaagtgatggtggccatgaggccatgaattacatccacctctgtgcttgtacctggctgtgaggtgtgaagtgagaccaggagaagatgggaaataaacgcgttccaaatgtctgctgtaatgagggggtctggagttcctgtgccaagaatcagattgcaggcctgatcacgagacgagctgttgattgctgcaggaatccaggaggtgttgtgtctgtgtgtgccttgccaccctgcaatgtagaattggctatcccattccacaaaggaggaagctgaggcccggagttacacggcgtgcccaaggctgtgtagctagtaagaagggaggtgggcatcctctgactgactctgagggcgggaccgccctgtgcttgcggggagcacaggggcattgttcttactgctttgggtccaagaccttctgagctcttatgagaccactgctggggccagctcacctggggactcagttcctgcccccactccccacccgttctttcttgccctctctctctccctctccacctccatccctgtcccctttccgtccatgcgcccacctccctggctctccctttcttctggtcccagccgctgagtggggtgggtgagcccagggccgaagagagaggtgggagatgtttgcaggtggaggacatgaacctgttttctctccaagccccttcccttcacattgttctgctgcccccaatgttaagtcaattgaattgtgtcagcaggctgcagggcataggctgcatgttgtagcgttgcttgtgagcgtctggaccccttctgggtatcaatgtgtgtgctttggcgcgtgaacatggggggctattgctgtttgtgtgggtgttgcatttgtggcatgcatgtgtttgtgcatctgtgtgtatgtgtgtagcggatgcactcttgtctatataggtaggatttttttttttttaattttactttaaggtccaggatacatgtgcggaatgtgcaggtttgtaacataggtatacatgtgtcatggtggtttgctgtacctatcaacctatcatctaagttttaagtccctcgtgcattaggtatttgtcctaatgctctcccttcccttgccccctactacccgctgacaggccccagtgtgtgatgttcccctccctgtgtccatgtgttctcattgttcaactcccacttatgagtgagaacatgtggtgtttggttttctgttcctgtgttattttgctgagaatgatggtttccagcttcatccatgtccttgtaaaggacacgatctcattcctttttgtggctgcatagtattccatggtgtatatgtgccacattttctttatccagtctatcattgatgggcatttgggttcgttccaagtctttactattgtaaatagtgctgcaataaatatacgtgtggatatgtctttatagtagaatgacttgtaatcctttgggtatatacccagtaatgagattgctgggttaaatggtatttctggttctagatccttgaggaatcaccacactgtcttccacaatggttgaactaatttgcactcccatcaacagtgtaaaagtgttaaaaggtatgcttaagcaggtagtgaacgctctcatgagtgcacacccacaggagcaactgcagaacctgtagggcccattgcaaaatgtaaatgctgcgccccttgtttaaaaataattaagaatttcaaagtgcaggcagcaaagcattatacccagcatgggccttagtgcagggccttagtgcagggcccagagtgactgtgcaggtcgcggcccatgaagctggtcttgtatgggggcaagttttctatttgtatgtgtatatgtgtatgctgattgtgtgactgctgtgttggtgtgtgtgtgtgtgatgtgtgcggtggtgtttcttgtgtgaatattgagcatctgtatgtgtgggctgtttgtgaggtgggacagctcttgtgagtgtgagtgttcttgggcacgaaatctgaaccctttcctcaccaccccaaggacagactcccttagcagctgcctatgcctgccaccgatgcctatcaaaggagaagtgtgttttatttttggcgcccttgccgcctattcccatggtgccctgggaggcttttgtttgactgcctttgttggaagggtgacaaacacttccctccacctgctgccatggtggccccaccagaaaccacagctgggggtggagcagcttcctcagcccctcacacacttgccctgcacctcgtgcaagcatcaacatgcccagagccctaccccgctgagcactggcctcccagactctgcccagacaaggcacccatagcaagtcagagctggaggcgatgggtagaaatgatttggtccagcaacctcattgtacagctggggagctggaggcccagaaaagggaggtgacctgcccatattgcccagtgactagtctgtggcaaagccatctcagccctctcagtcatctgcagggctagcccatggaggaagcctaggtaagaagcagggcctagaggggagaagcagggacaaggtactgtggagcagcaaagacctggttattgcccagctgtgggggtcacagcccctggcaggtgggggctgtgtctttgttatttgattctcccttctcccaggtcagagctctgtgtctggcagggtttgaaagatgttggctggacacagcacagtgcctggcactcagtaggggctccagaaatatttggtattaaacagctgtttagttgaacggtgaagtagggtgactaaagcaagaaatttggaggcagctagaactggttgaaatcacttagtagctgtgtgacattgataaagttacttaacctctctgagcctaagtttcctcatttattaaatgagactctagtagagttgttgtggggattaaatgagataagatactgatgcttaatacagtgtatagtacgtaacaaaatcttaataaagttgctagctgtgtcaccacaggtaagttacatgagctctctaaacctgtttccttctctgttgtcataagaattcaatgaaaggttgtatagctagcctagtccttggtgcatcacgggcacttagtaaatgttagcctgtctcccgcctaggttcattacccctccacctcttcaacgtctctttcctctgccccccagcctctgtgatcgctgccatcccttccatggcatctcatctctcataccttctgtctcccagcctctgacactcccagcaacaaaagctcacaaggtctttcggtccatggtttcctcagggttcggctctgatgagcatgggtgggaggggggcaactgagaaggaggctgaggacaggacaggtgtagtccttggacgaaaatcccagttctgcttttgacaaaggatttaaggattccggcgtgtctagccctgtgtcttgccctggagaacaaaggcagagggatgtcttcctgaacagcccaggcacaaagctgccaccattcttcccattcccttcctcctgatttccaagtccagaggttgtcaatagcactctcagcagctgagcttccctgaaatcggggtgtgtggaggagggcaggtggcaggtaagagatactagtgcaagcaagagggcgtgtccagagagtcagttgtaggagaagtctctggagcttcggggcaggaggcagagctggctcccacataggtgaccccctagcaccggcttcaccataggcctgggccaggccacagaaaacaccctctgggcctgggaagcagattgagccattcagtctttacacgtggtcaggtttctgcttcagtcacttgagtgcagtttcataaaccaaatgagatcaatgagcttgtcctttccaggcctctttttaaacattgggaaatggtttgggggcatctcatctgctgcatctgctgtgcttcccaatgtcagatattatttacttggagcaaatataaactattctgtcctaaataaactctgacacaggaacaagaggacttcagggcaagaaccatctccttaccttccctcttgctagtgggcacggatatgtgacctggagacctattgcatcatgcaggaactgagccagtccagagctggccaagcctgtgcggagatgtttatttacccagagatgagaacctggaggccacactatgtggtggttactgtaccacgtaggacagcccagctagcgaagtccctggggttagtgaacaacacacaaaaataaggttatatccatcctcaaagtgaatatgggcaggagagaatctgacagcggcagaggagtctgaattgggtcatgcacagacacaaagagaggagcccgtggggaatacacatcctggcgtttctgatttcgcacgagatcagctgagattcgcttagtctggagcagctctccacagaaaagggcctggggagctttttctgcacacagactcctgtctgtgtctctgcctgggcccaagagaagtgaaggaacagagggggtggctgctggaggagttgggacttctcagacagctgctcccgtgggttggagtgctaggagggcttgcttttctgaagcctgatagggttgctcttttgagttgagggagaggcccccccccaaccttttttattctccttggagtttctctagggtctcagaccagagacacatgaccgattctaaccatcttctctgcaaagaaggccatgggcccacctgtctctaagactaatagagcccccttctcctcacctgagattgggagacctggggaggctctatgtgtgtgtgtgtgtgtgtgtgtgtgtgtgtgtgtgtgtgtgtgcacatgcatgtgtgtgcatgcaggatgggacatctaactacccactgaagatttgcttcaagtcccgcccccagtgtatattccctaaaacccattcctgccccatcttccccctgcctttcccccatctcctttgccttaattccccccacaatccctttaggtctgtttcttttcctccaactgttcaccctcaacaaagacatgtaactgagaaccattcccagagaagacggcccatcttcctttcttaaaaagatcagttgcctgatttcctttgggaccgctgccatatttcttttatatttcattcattctccagactcagtgataaggacaggaactatttaaaggggagaagggaggttctccttaaggacctaatcaaaggacaagatgaacggtgcctgccggagagaacgagacagcgtgggatgagggcgggtgccacggtggatgtgcagggatgttcccgtgagcccagcagggtctggtgggaagagctctggttaggagcccagggaactaggttaaagttccagcattgcaaagacctcccaagagacctcaggctagttgcttccctctcagagcacgagttgactcaccatgcaatggatggaaaggccagattcactcatctctaaattgccttccagcttgaattataaattctgtggggatggaaatgggctaaggaattgaatttggtttccttgtggttagcaacttttttttttaagttaccgtttcttaaacatctcctaaagattaccaacaacacatatgtaagtttttctaagcattttacatatatggattcgttgccttccacaacaatcctaggacataggtaccattagtatccccattatacagattaagaaactgaggtacagggaggctaagtaaccagcccaggcagtggagccggggttcaaaccaggcagtctggctgcaaagtccctcttcctcaccaccacactcaacattccaggcactgtgctaactgtttacacaaatcctctccattttgcagttgagaaacccaagactcagaccagttgggcaacagctgaaggtcacatagctgggaagcagtagagatgagattcaaagtcggcagagctccagagtctctgctctcccccacaccctcctgcaaccctgccagacgctcaggcttccaaagcaagtttaaccaatatccctgcattgccacgcctcttcaggcaagtcagcttctccccgctgggcctcagtttcaccatctagaaaatgactgggggattggcccagctgatctttgaggtcccttggagctctgtgagtctgtgatgagaaaggtgtggtgcttctagctgaaagggaagacctgtggcctgggaataccttgggcttggcttggggttgcagccagcaaggatgagggagatgagggcctggggatgaaatgaaaaggaaatttcaggtgactggagaaggcttattggctgtgaacctgggaagagggttcagatgtatgaagcaggtaagaaaagaagagagaagccctgggtgggcctcccagggggccttttccttcttcccaggggtcaccccaagctcaagatgggcacatgagagcctcgggcaagggagcagggatcaggccagcactgaaccgaggtcagaacttctgagacacagcagttcgagggaattgacattgctgggggttttgttttctctgtaaatatttggagatgtccagttattctagaaaaatgtatctgcagctgagggggcgcatttgtgcggctggcctggctgccttttgcatgactgctctgttacattcttccccttcaggaaccgagggttgttttcccatctgtaacctcattaggatgtccacaccagcgggctccacacgcacatgcgctccggcaggttcccctcggggacacacacgcacactggcattgccccctggccacacgctcacgcacacagtcgcagctgtgccttttaatatttaatgccattgctgcaaacgccgctccacgctgactgcatccgtgccaggctcattcctctcagggcgccaattcccggcttggagaccagctgacaaatcttgttaaaaaccttccagcccagtgcatctctcggaggagggtaatgtcacgtgcttgcgagatgagcgaatgggtgtcattaccaggcagctccattttcaacgaggctctttccacttggggaaatggatggaatcacctattgcgtgagtgcctcagccctccctctagctccccacggcccagagctattgcagctctgggtccttcagacccctcttgacgcattgtaggttggactgacctgctctctggcttgcagaagtcacggctctgggtggcaccaaggcacgaaatgacacggacacctggcctgtgtgggggcctttgtctgtccctctctccctgctcctccacagtcagtatccacactatggtttgaatgtatgtatctttccgacattcatatggttggaacataaaccccaaggcaatggtatgagaagttggggggggcctttgggagttgattaggtcatgaaggctccacccttgtgaacgggattaatgcccttatagcaataaaagagcaggagggaactagttaggctcattgtgatcttccactcttctaccacatgaggacacagtgtttgtcccctccagagggcatggcaaggccccatctcggaagcagagagagtccacaccagacactgaatctgttggcgtcttgatcttggacttccaatcctctaaaactgtgagaaatacatttctatggtttgtaaattactccatcggtggcattttgttgtaccagcaggaagggactatgacatacaccacggaggccactgctgctacagtggctagcagagaggatcatgggtggttccagctctcatgccagcaaagggtctcatccctgacccctagtccagtatgctgtggtctccaagcccacagaaaggccctccctccaaaccccagctttcagagtctaaggggctgacaaaaggttaagggctctagttctggtctgagctgggacaggtgagcaggctactgtgcaagagctgctaaatgcagagtccccaggtatcgaggttacccggaaaagttggccttcccaaagctgcagtaggatcagcatgtccggttcagtgctgactgtgcaggcttggggcctatcccttgaactctggaagggtatttgcaagatggacctcctgtcctcatcttccttctacctttcagcctcttggtcctgtgtcaccagacgggctcagagcattcctgagcaactttgtggttctgagcgtctctaagaaacgaggcctgggagagggcagggaggaggggagaggggacggtcaggtggggtgtgggggattgcaaaacaaagacacgctcatttgccatttaccaaagactttttttttctttttcttttaaagctgttgtttcctcaagggaaaactttatctgtgtgtgggtaaaatgttgctctcttaacgaatcgaaagcagaacatgaggagaggttttcagtccctgtgacaaagaacaaagaacaagctcgtgggccttgggcggccactgtcaccctccccgcccctgacatttcccttgtcctctcctcccatcccagtggagccaagagctgagtgcatgtcatccccactctggagcccagagtgtggctttgatcacgcggaggcagctggcctggcctgcaggaaacaccacactctcccctgttgagagcctgggagggcgacgcggcaagtgaggggatgagtgtgcttttagggcggcgtggcagctgccattcccgctggcttggaggacagtgaagaaaacgatggagggaggggttcagagagtttgtttgaccagctgatgtccgcttttcctcaccaagccaagaagtctccccactatctctggtcttggagataaggcctggttttcggaagagctggtctgagcatttgagtctgtgggaggccagaaggttcattcagaggactcttcaggccactcccacgccccttgcactcaccctccttggccccttcactccagcaggtgggaacagtttctggactttcactttcagtttttggtttaggggacaatagcctctgtttcccagtgttgtctgtctggtgttagcttatcagccctgtctttttttggcattggttgaggtagctgggattggggtgaagctatcttctggagcaggggcttgcactctgaggggagagctgcttttccctgagcagcttttggcggggggatgtcctgagtcattgcatctgctccctatccccaccccagggaccctgggagaggtccctctagtccaggcagaagagtcgcctatggggagaaggtggtggtggtctcggcctccacactcatggaggagcgccggatgtgccgacaggaagaccactgccggagctgctcctggctgaggcagcccaggtccttgaagagcttgaagagatcgttgcggaacttgacgccgatgaaggcgtacaagaaagggttgacgcagcagcggacgcaggccaggctgtaggtgacgtcgtaggcgatgttgagttgcttactgagctcacaggtgctactggtgatgttgaagttggccaccgtctgggccaggaccaccccattgtagggcagctggaagactatgaagaccacgaccacagcgatgatcaccttgatggccttgttgcgctcaaagttgcgtgcctggagcagggtgcggatgatgacaaggtaacagaagctcatggccagcagggggaccagaaagccgatcaccatctgggccacctggatggtgataaaggcctccacatgctctgtgatgagagagcatcgcatcgcttgctcactgctgctcctctggaggtcactgtacaggagctctgggatggagagcactgtggctagtatccagatgcccacacaggacagcttgctgatgagaaggacgcgggcacggtggcggtgagctgagacagcctggacgatggccacgtagcggtcaatgctgatgcaaagaagtaggagcatgccactgaagaagctcatcttgtagatggcaaagatgagcttgcaaaagtggacaccgaagacccaggacttggccgcgctgtaggcccagaagggaagggtcaggaggaagaggatgtctgccaccgccaggttgagcaggtaggtatcggtcatggtcttgagcctcttgaaatagatataggtcaacacgaccagcccattgcccagtaggcccacgaaacaaatgatggagtacatgatagggaggaaccaggctttaaagttccgcacgtccttcttggagcacaaagactcgaacaaagtgtagtccactgtggtgttgtctccgatgtaatcgtccgtgacctcatcttgacacaggcataccttcggggaaggaaatgagggaaaacaggccagtttagctgggtggctccaactctggctgggatttagcctagagcagtggtttctttcttttttttttttcttgagacatggtctcactctgttgcccaggctggagtgcagtggtgcaatcatggctccctgcagcctcggcctctccaggctcaggtgatccttccacttcagcctcctgagtagctgggaccacagccttatgccaccacacccagcgaatttttgtatttttagtagagatgggattctgccatgttgcccaggcgggaggaatagtggtttcatcgtgaggtccgcatcatcagtatcatagcatcacctgggaacttgttaggaatgcaaattctcaggccccacctgagaattctgaaccagaatctcaagtgatgggtctaggaatctgtgttttcctaaagtctccaggtgattctttggttttaaatcagtgcttctcaaattttaactccaatacgcatcacctgattaatcctgtgaacatgtctatcctgaatcagtaggctaaggtggggcctgagattctacagttctgctagtaagtagcaagtggctgattttgccaagtctgagagactctacatgtgctgacaggggactggaaatcagctgggctctggggccagatgagccttgagctggttaaactctttctgtctctctctctctctctcagagcctcagttttctcttctgtgaaatggagatgaatcctatttgcttcccatggttgctgtgaggtacctagcccaggctccagcaccatttcctctccatggagctttaattttgccccctggaagctccgtgagagagggaacatgtgtctttcttcttgaccctcctttagaacttggtggagttttccagggggcttacaaaagacctcagctttagggggaaaatccacctgggggtcaaggttgaggagggcctggagtaagaagagaggaaggcaaatgctcccattttgaggccatgaagccttgggtttggggcaaactgctgtgatcatgggtggtgggtgacctggagagactctagatcctgggtcccctcttagcacccagcaggagctcaggcaacgtgagcccaagtgccataaactccgtgaatggatgatgggccatgggggtgggggcgaggactcctcagcagctgtgtccctggaaggaagcgcagctctcatctcccactctccctctgtgctcccgccctctccccccacctctctgcctctctcttcctcgcatctcttccggcagatcccaatcagcaggactcagctgctggagctttttttagccgtctgcagggtcgggtgaaggttcagcagcctgctgtgattttatcaatgaaggagggggtccatgcctgcccctgcctctgcgcacagcgatggacgggtttgtgcagggcagggagctgggctggaggacctgcctcacgaggctcatggttctatcaccaggaaccagattcagcagctcagcgacggtgggtttctatccatttatgctggagggattcaccgcatcttgtctctatctctttttcacacccaggttctggattcatcactgtcctgcttgggaacatggtgaggacaaaatgatgtccaggagccttttctttggccattgctagcctgagacgaaaagtcagtggcaacccctcttccctttcctgggcatggctgcagcctgggagccctgaaggaggctgctgcctttggcccagccatggttacggcccaaggccttagacccggggtccctggacatgagggggtctcagccttcctggagggcagtactcccggcctctatgaagtgcactctgcatcatccagtcctgccttcccttctccccttgaaccttgttcctgttttataattctccctcccctagcctcactgcctctgcagcccacagccccaccacatcctgccctatctgagcaccccctccccaagtgaaagggaagaatgagcctcagctgtcctcctccccttcccacccttccagcctccactgccagcaatacagccccccagagtcctggagacaggggagagagaggagggagtggtgatggggaagggggccaggctatgggctgcagcccaggctccggggggcctctgggatggggttttgggaacagtgcccagcttggggcctgcctctggcctgagcttctggaaagctgcccctctggcctccagacctggggatgagccgaattctgaagcactgcctctctagctctggcctcagttggactcccctacccctactctgagctcccacctctaacaaatgggagaaagttgactctgcgagttacagtttcttctaactttggcacttggtgaggcacactttctgtctgtttctggatggagaaacagaactttgtaaagtgagggtctttgttcctgccgagttcaggcctgctataaagtgtgtgctcatccacccctctccccatccctagggccccatcctctcttccctcccctgccagggaggccggatgggtctctatttcaccaaagaaaacgggggctgcgagggaagcctttgggtgaaggttggaaagagacaactttggggcgataggatagtaacaagatcgccagatccagggtgattttctcagcacacgtgcacaaaacccagtaacattttttgctttttgcagctcttctctctctaagaactcagagtccatatttctgtctcctgggcagggagattggaggtgggatagggaaggtggtaagttattttcccccatgttttaacctaaatggagtaaaggaagtccagagaacatctgtggctctccagggtcactcagcagatggtgagggggcagccattagcttaatgagtggcaggcgggcttatgtctgggtcttgtatcttctagcaaatgcccagctcctccactaaacccctgacttgggaggccgtgtggagaagggaacagagctttccttggcagagaacctcacctggaaaatgacaaggagagccaccaccagcacgcttttcattggtttccctgtaggagacaaggcgagaaagttattgcttggcagggacaagtctttgttattaaagaaagcagtggagggggagacgctgttgggaactttcctcccaagctccaggcactgtgtttgctgaaagagaacatcagaaccagattgtgcctttgaacacctggcctgctgcccggcatcactgtcctcacctccttcttgtcctcctccactcccaggtcctggaaagaagcagcatcagaatgcagggcagcccctcccaccccctgtcttggcccatctgggctgcttcttggagctgggaagtcttctctagcccagaccacccctcaagactgagcttggttggtgggtctgagtgccccctcccactccacctgatgtgggatgaggcggcaaagctatgaggtcgtggggtaggtgcacacgtttccagccctgctttggtgctggtagccactggcccaggagcattttcctggcatccaggtgagtgcgcagccacacgtgcatgaagccaagcctgagtgtctcctgagggaggtgggctgaggaaggaggatgacctcacaggctgggtagagggatgaggttccttactggtccacagcgatggagactgcctcagggctccaccagctccacaacaccccctcactgaaatgacattcattcagcactgactgttggtccactgggcgcacacccttggcctgcctttgggacagagatcccttcccttttatcttgtgcaggcccagaattgaggaggtgccccacaattgtgtgctgatgaatatatgaatgataaatacatgaatgatgaataaatacatgaatgacaagtaaacgaatgcctgtcctttttccaagggagagggcatcaagatggcccgagaggacacagaagggatgctgtcctgttgcagtgtgggggaaggacgctctttcctgatgtcacgacttctttatttttttgcttaactgaagtgcctgcacacactttctctcctttaacttgttttctaacttaggcttggggggcaggtgaaagggggaacagggtcagctttgggaagcgacgtgttctggaagtcaggaggcttcctggggtctgagcagctgatggggaccccggtgtagcacaaggcccagatgtgctcagtctggttttgtggctgagcctggggcccagcaggaacttatttcttcctgaggctgagcagggaggacagttgacagagtaatttgcctagatgttttagcttacctacaagtcagggcggcagtagccctcttcccgtatcctgaccctcaggtcccagctaggtagggcctggcccactggagagtcagtaactgcgatgccacaagtgaaggcaggcccttggcagctccaagctcaatagcgccaggaaatgcgtgggaacctgtttaaggcaccttctcctggaggctggggaagcagtgagagcccagcgcttccgtgtccttggccacagcaccacctgctggaagcctccctgcatggcacccaggttgcagttggttaatgtgttccccggaaattgtgtaaagccagggattctgggcttgggagttcctccgggaaggagagactgcatcgggctacataaataaataggtatttctcccgccttgagcaaatagtcctgcacactactgctagacacatctgcctaaagcttagctctgatggcagtccccacctcaccttcctcctaaatcctcaggggctctaaccggccctgaggatgaagcccctgatgcttggcctggcagtccagtcctccgctgtccactcaaagagggcttcctagctgcattttctattctggggacaggcagccgctgtcccctcgttcccagcctgcgctcgggcatttgtagtcctgctgcgattggaccctgttgcaacagagctccccaccgctcattcccctttttcactgaattaccccttagctcctgagtttaagtccacgtttacgcccaaccacactcttcacggttcaacgctccacccgccctccactgactcatctagaggtcgagtctcgaggtttctttaaaacacgtaagtgtctttcggttactctagagaaagcccgctctgactgtcagggagaaatgagaaacctcaaagttttgataagtcacaacgggtgagatctgaggagcaagaactgtgtttctgttgaactctgttgataaccccttctcccggacgctgtcccactcctgctgttcccgtcaggggaggggagttgggggagtgctggcgtgtgtgcctgtgatttctcattccaggtgttttggaggaggtggatgagcaagggtcttgtaggtccaaaacaggtggctttcaa
